(19) United States
(12) Patent Application Publication
(10) Pub. No.: US 2024/0103010 A1
(43) Pub. Date: Mar. 28, 2024

(54) PVRL2 AND/OR PVRIG AS BIOMARKERS FOR TREATMENT

(71) Applicant: Compugen Ltd., Holon (IL)

(72) Inventors: Roy Z. Granit, Modiin-Macabim-Reut (IL); Gad S. Cojocaru, Ramat Ha-Sharon (IL); Eran Ophir, Even Yehuda (IL); Amit Novik, Binyamina (IL); Niv Sabath, Regavim (IL); Zoya Alteber, Nes Ziyona (IL)

(21) Appl. No.: 18/185,632

(22) Filed: Mar. 17, 2023

Related U.S. Application Data
(60) Provisional application No. 63/321,564, filed on Mar. 18, 2022.

(51) Int. Cl. G01N 33/68; C07K 16/28; G01N 33/50

(52) U.S. Cl. CPC G01N 33/6857; C07K 16/2803; G01N 33/505; G01N 33/6893; A61K 2039/505; G01N 2333/70503; G01N 2800/52; G01N 2800/7028

(57) ABSTRACT

The present invention provides biomarkers for use in determining populations for treatment with anti-PVRIG antibodies and such biomarkers include, for example PVRIG and/or PVRL2 expression.

### CROSS-REFERENCE TO RELATED APPLICATIONS

[0001] This application claims priority to U.S. Provisional Patent Application 63/321,564, filed on Mar. 18, 2022, which is hereby incorporated by reference in its entirety.

### SEQUENCE LISTING

[0002] The instant application contains a Sequence Listing which has been submitted electronically in XML format and is hereby incorporated by reference in its entirety. Said XML copy, created on Jul. 17, 2023, is named 114386-5026-US.xml and is 1809 KB in size.

### BACKGROUND OF THE INVENTION

[0003] Naïve T cells must receive two independent signals from antigen-presenting cells (APC) in order to become productively activated. The first, Signal 1, is antigen-specific and occurs when T cell antigen receptors encounter the appropriate antigen-MHC complex on the APC. The fate of the immune response is determined by a second, antigen-independent signal (Signal 2) which is delivered through a T cell costimulatory molecule that engages its APC-expressed ligand. This second signal could be either stimulatory (positive costimulation) or inhibitory (negative costimulation or coinhibition). In the absence of a costimulatory signal, or in the presence of a coinhibitory signal, T-cell activation is impaired or aborted, which may lead to a state of antigen-specific unresponsiveness (known as T-cell anergy), or may result in T-cell apoptotic death.

[0004] Costimulatory molecule pairs usually consist of ligands expressed on APCs and their cognate receptors expressed on T cells. The prototype ligand/receptor pairs of costimulatory molecules are B7/CD28 and CD40/CD40L. The B7 family consists of structurally related, cell-surface protein ligands, which may provide stimulatory or inhibitory input to an immune response. Members of the B7 family are structurally related, with the extracellular domain containing at least one variable or constant immunoglobulin domain.

[0005] Both positive and negative costimulatory signals play critical roles in the regulation of cell-mediated immune responses, and molecules that mediate these signals have proven to be effective targets for immunomodulation. Based on this knowledge, several therapeutic approaches that involve targeting of costimulatory molecules have been developed, and were shown to be useful for prevention and treatment of cancer by turning on, or preventing the turning off, of immune responses in cancer patients and for prevention and treatment of autoimmune diseases and inflammatory diseases, as well as rejection of allogenic transplantation, each by turning off uncontrolled immune responses, or by induction of “off signal” by negative costimulation (or coinhibition) in subjects with these pathological conditions.

[0006] With regard treatment therapies, a particular pathway and target of interest is PVRIG. PVRIG is a transmembrane domain protein of 326 amino acids in length, with a signal peptide (spanning from amino acid 1 to 40), an extracellular domain (spanning from amino acid 41 to 171), a transmembrane domain (spanning from amino acid 172 to 190) and a cytoplasmic domain (spanning from amino acid 191 to 326). The full length human PVRIG protein is shown in FIG. 1. There are two methionines that can be start codons, but the mature proteins are identical.

[0007] The PVRIG proteins contain an immunoglobulin (Ig) domain within the extracellular domain, which is a PVR-like Ig fold domain. The PVR-like Ig fold domain may be responsible for functional counterpart binding, by analogy to the other B7 family members. The PVR-like Ig fold domain of the extracellular domain includes one disulfide bond formed between intra domain cysteine residues, as is typical for this fold and may be important for structure-function. These cysteines are located at residues 22 and 93 (or 94). In one embodiment, there is provided a soluble fragment of PVRIG that can be used in testing of PVRIG antibodies. Included within the definition of PVRIG proteins are PVRIG ECD fragments, including know ECD fragments such as those described in U.S. Pat. No. 9,714,289.

[0008] PVRIG has also been identified as an inhibitory receptor which recognizes CD112 but not CD155, and it may be involved in negative regulation of the anti-tumor functions mediated by DNAM-1. PVRL2 was identified as the ligand for PVRIG, placing PVRIG in the DNAM-1/TIGIT immunoreceptor axis (see, Liang et al., Journal of Clinical Oncology 2017 35:15_suppl, 3074-3074).

[0009] Anti-PVRIG antibodies (including antigen-binding fragments) that both bind to PVRIG and prevent activation by PVRL2 have been identified, however, there remains a need in the art to develop biomarkers for determining which patient populations for which anti-PVRIG antibodies might find the most beneficial use in treatment. As such, biomarkers for use in identifying these populations are needed.

[0010] Accordingly, it is an object of the invention to provide biomarkers for use in determining populations for treatment with anti-PVRIG antibodies (e.g., anti-PVRIG antibodies including those with CDRs identical to those shown in FIG. 3, also referred to herein as anti-PVRIG treatment antibodies). Such biomarkers include, for example PVRIG and/or PVRL2 expression, as described herein.

### BRIEF SUMMARY OF THE INVENTION

[0011] Accordingly, it is an object of the invention to provide biomarkers for use in determining populations for treatment with anti-PVRIG antibodies including and such biomarkers include, for example PVRIG and/or PVRL2 expression.

[0012] The present invention provides a method for determining a cancer patient population for treatment with an anti-PVRIG antibody, the method comprising:
[0013] (a) detecting the presence in a biological sample from the cancer patient one or more cellular components selected from the group consisting of:
   [0014] (i) TSCM, TRM, naïve, exhausted, cycling, and effector CD8 positive T cells, that express PVRIG; and/or
   [0015] (ii) activated DC cells, DC1, and/or DC2 that express PVRL2,
[0016] (b) quantitating the measurement of the level of components selected from the group consisting of:
   [0017] (i) TSCM, TRM, naïve, exhausted, cycling, and effector CD8 positive T cells, that express PVRIG; and/or
   [0018] (ii) activated DC cells, DC1, and/or DC2 that express PVRL2; and
[0019] (c) treating the cancer patient with an anti-PVRIG antibody when one or more cellular components in (a) as quantitated in step (b) are present at an increased level as compared to a control or a patient that does not have detectable levels of the cells.

[0020] In some embodiments, the present invention provides a method for predicting or determining the efficacy of treatment with an anti-PVRIG treatment antibody, the method comprising:
[0021] (a) measuring the level of one or more cellular components selected from the group consisting of:
   [0022] (i) TSCM, TRM, naïve, exhausted, cycling, and effector CD8 positive T cells that express PVRIG; and/or
   [0023] (ii) activated DC cells, DC1, and DC2 that express PVRL2;
[0024] (b) quantitating the measurement of the level of one or more cellular components selected from the group consisting of:
   [0025] (i) TSCM, TRM, naïve, exhausted, cycling, and effector CD8 positive T cells, expressing PVRIG; and/or
   [0026] (ii) activated DC cells, DC1, and DC2 that express PVRL2; and
[0027] (c) correlating the level of the cellular components with the efficacy of treatment, wherein any of the cellular components being present and/or being present at an increased level as compared to a control or a patient that does not have detectable levels of the cells, is indicative of treatment efficacy for treatment with an anti-PVRIG treatment antibody.

[0028] In some embodiments, the method further comprises:
[0029] (d) treating the cancer patient with an anti-PVRIG antibody when any of the cellular components in (a) are present at an increased level as compared to a control or a patient that does not have detectable levels of the cells.

[0030] The present invention provides a method for predicting or determining the efficacy of treatment or determining a population for treatment with an anti-PVRIG treatment antibody when any of TSCM, TRM, naïve, exhausted, cycling, and effector CD8 positive T cells, that express PVRIG comprise at least 0.5%, at least 1%, at least 1.5%, at least 2%, at least 2.5%, at least 3%, at least 3.5%, at least 4%, at least 4.5%, at least 5%, at least 10%, at least 15%, at least 20%, at least 25%, at least 30%, at least 35%, at least 40%, at least 45%, at least 50%, at least 55%, at least 60%, at least 65%, at least 70%, at least 75%, at least 80%, or at least 85%, of the total CD8 cells in the biological sample is indicative of treatment efficacy and/or indicative for treatment with an anti-PVRIG antibody.

[0031] The present invention provides a method for predicting or determining the efficacy of treatment or determining a population for treatment with an anti-PVRIG treatment antibody when any of activated DC cells, DC1, and DC2 that express the PVRL2 comprise at least 0.1%, at least 0.2%, at least 0.3%, at least 0.4%, at least 0.5%, at least 0.6%, at least 0.7%, at least 0.8%, at least 0.9%, at least 1%, at least 1.5%, at least 2%, at least 2.5%, at least 3%, at least 3.5%, at least 4%, at least 4.5%, or at least 5%, at least 10%, at least 15%, at least 20%, at least 25%, or at least 30%, out of total myeloid cells in the biological sample.

[0032] In some embodiments, the presence of and/or an increased level as compared to an untreated control and/or to a control prior to treatment, of one more cellular components, is indicative of anti-PVRIG treatment efficacy:
[0033] (i) TSCM, TRM, naïve, exhausted, cycling, and effector CD8 positive T cells, that express PVRIG comprise at least 0.5%, at least 1%, at least 1.5%, at least 2%, at least 2.5%, at least 3%, at least 3.5%, at least 4%, at least 4.5%, or at least 5%, at least 10%, at least 15%, at least 20%, at least 25%, at least 30%, at least 35%, at least 40%, at least 45%, at least 50%, at least 55%, at least 60%, at least 65%, at least 70%, at least 75%, at least 80%, or at least 85%, out of total CD8 cells in the biological sample; and/or
[0034] (ii) DC cells, DC1, and DC2 that express PVRL2 comprise at least 0.1%, at least 0.2%, at least 0.3%, at least 0.4%, at least 0.5%, at least 0.6%, at least 0.7%, at least 0.8%, at least 0.9%, at least 1%, at least 1.5%, at least 2%, at least 2.5%, at least 3%, at least 3.5%, at least 4%, at least 4.5%, or at least 5%, at least 10%, at least 15%, at least 20%, at least 25%, or at least 30%, out of total myeloid cells in the biological sample.

[0035] In some embodiments, the biological sample is obtained from a tumor, tumor microenvironment, and/or peripheral blood from the cancer patient.

[0036] The present invention provides a method for determining a cancer patient population for treatment with an anti-PVRIG treatment antibody, the method comprising:
[0037] (a) measuring the level of PVRIG and/or PVRL2 expression in a biological sample obtained from a cancer and/or tumor microenvironment and/or peripheral blood in the cancer patient,
[0038] (b) quantitating the measurement of the level of PVRIG and/or PVRL2 expression in the biological sample, and
[0039] (c) treating the cancer patient with an anti-PVRIG antibody wherein PVRIG and/or PVRL2 is expressed and/or expressed at an increased level as compared to a control or a patient that does not have detectable levels of the PVRIG and/or PVRL2 in the biological sample.

[0040] The present invention provides a method for predicting or determining the efficacy of treatment with an anti-PVRIG treatment antibody, the method comprising:
[0041] (a) measuring the level of PVRIG and/or PVRL2 expression in a biological sample obtained from a cancer and/or tumor microenvironment and/or peripheral blood in the cancer patient,
[0042] (b) quantitating the measurement of the level of PVRIG and/or PVRL2 expression in the biological sample, and
[0043] (c) correlating the level of PVRIG and/or PVRL2 with the efficacy of treatment, wherein PVRIG and/or PVRL2 is expressed and/or expressed at an increased level as compared to a control or a patient that does not have detectable levels of the PVRIG and/or PVRL2, is indicative of treatment efficacy for treatment with an anti-PVRIG treatment antibody.

[0044] The present invention provides a method for altering the regimen of treatment for a patient with cancer, the method comprising:
[0045] (a) measuring the level of PVRIG and/or PVRL2 expression in a biological sample obtained from a cancer and/or tumor microenvironment and/or peripheral blood in the cancer patient,
[0046] (b) quantitating the measurement of the level of PVRIG and/or PVRL2 expression in the biological sample, wherein PVRIG and/or PVRL2 being expressed and/or being expressed at an increased level as compared to a control or a patient that does not have detectable levels of the PVRIG and/or PVRL2 is indicative of treatment efficacy,
[0047] (c) correlating the level of PVRIG and/or PVRL2 expression with the efficacy of treatment, wherein a high level of PVRIG and/or PVRL2 expression is indicative of altering the treatment regimen for treatment with anti-PVRIG treatment antibody, and
[0048] (d) altering the treatment regimen to include an anti-PVRIG antibody when a moderate or high level of PVRIG and/or PVRL2 expression is measured.

[0049] In some embodiments, the anti-PVRIG antibody comprises the vhCDR1, vhCDR2, vhCDR3, vlCDR1, vlCDR2, and vlCDR3 sequences from an antibody selected from the group consisting of CHA.7.502, CHA.7.503, CHA.7.506, CHA.7.508, CHA.7.510, CHA.7.512, CHA.7.514, CHA.7.516, CHA.7.518.1.H4(S241P), CHA.7.518, CHA.7.520.1, CHA.7.520.2, CHA.7.522, CHA.7.524, CHA.7.526, CHA.7.527, CHA.7.528, CHA.7.530, CHA.7.534, CHA.7.535, CHA.7.537, CHA.7.538.1.2.H4(S241P), CHA.7.538.1, CHA.7.538.2, CHA.7.543, CHA.7.544, CHA.7.545, CHA.7.546, CHA.7.547, CHA.7.548, CHA.7.549, CHA.7.550, CPA.7.001, CPA.7.003, CPA.7.004, CPA.7.006, CPA.7.008, CPA.7.009, CPA, 7.010, CPA.7.011, CPA.7.012, CPA.7.013, CPA.7.014, CPA.7.015, CPA.7.017, CPA.7.018, CPA.7.019, CPA.7.021, CPA.7.022, CPA.7.023, CPA.7.024, CPA.7.033, CPA.7.034, CPA.7.036, CPA.7.040, CPA.7.046, CPA.7.047, CPA.7.049, and CPA.7.050.

[0050] In some embodiments, the anti-PVRIG antibody comprises the variable heavy domain and the variable light domain sequences from an antibody selected from the group consisting of CHA.7.502, CHA.7.503, CHA.7.506, CHA.7.508, CHA.7.510, CHA.7.512, CHA.7.514, CHA.7.516, CHA.7.518.1.H4(S241P), CHA.7.518, CHA.7.518.1, CHA.7.518.2, CHA.7.518.3, CHA.7.518.4, CHA.7.518.5, CHA.7.520.1, CHA.7.520.2, CHA.7.522, CHA.7.524, CHA.7.524.1, CHA.7.524.2, CHA.7.524.3, CHA.7.524.4, CHA.7.526, CHA.7.527, CHA.7.528, CHA.7.530, CHA.7.530.1, CHA.7.530.2, CHA.7.530.3, CHA.7.530.4, CHA.7.530.5, CHA.7.534, CHA.7.535, CHA.7.537, CHA.7.538.1.2.H4(S241P), CHA.7.538.1, CHA.7.538.1.1, CHA.7.538.1.2, CHA.7.538.1.3, CHA.7.538.1.4, CHA.7.538.2, CHA.7.538.2.1, CHA.7.538.2.2, CHA.7.538.2.3, CHA.7.543, CHA.7.544, CHA.7.545, CHA.7.546, CHA.7.547, CHA.7.548, CHA.7.549, CHA.7.550, CPA.7.001, CPA.7.003, CPA.7.004, CPA.7.006, CPA.7.008, CPA.7.009, CPA.7.010, CPA.7.011, CPA.7.012, CPA.7.013, CPA.7.014, CPA.7.015, CPA.7.017, CPA.7.018, CPA.7.019, CPA.7.021, CPA.7.022, CPA.7.023, CPA.7.024, CPA.7.033, CPA.7.034, CPA.7.036, CPA.7.040, CPA.7.046, CPA.7.047, CPA.7.049, and CPA.7.050.

[0051] In some embodiments, the anti-PVRIG treatment antibody comprises a heavy chain variable domain from the heavy chain of CHA.7.518.1.H4(S241P) (SEQ ID NO:8) and a light chain variable domain from the light chain of CHA.7.518.1.H4(S241P) (SEQ ID NO:13).

[0052] In some embodiments, the anti-PVRIG treatment antibody comprises a heavy chain variable domain from the heavy chain of CHA.7.538.1.2.H4(S241P) (SEQ ID NO:266) and a light chain variable domain from the light chain of CHA.7.538.1.2.H4(S241P) (SEQ ID NO:271).

[0053] In some embodiments, the PVRIG and/or PVRL2 expression is determined using single-cell resolution analysis.

[0054] In some embodiments, the single-cell resolution analysis includes RNAseq, immunohistochemistry (IHC), multiplex immunohistochemistry (mIHC) and/or immunofluorescence (IF), flow cytometry (e.g., FACS) and mass cytometry (e.g., CyTOF), as well as combinations thereof.

[0055] In some embodiments, the PVRIG and/or PVRL2 expression is determined using immunohistochemistry.

[0056] In some embodiments, the PVRIG antibody used for the single-cell resolution analysis and/or immunohistochemistry is AB-635 PVRIG Ab (6D8-1 clone).

[0057] In some embodiments, the PVRIG antibody used for the single-cell resolution analysis and/or immunohistochemistry is 6D8-1 (heavy chain SEQ ID NO:659 and light chain SEQ ID NO:663).

[0058] In some embodiments, the PVRIG antibody used for the single-cell resolution analysis and/or immunohistochemistry comprises:
[0059] i) a heavy chain variable domain comprising the vhCDR1, vhCDR2, and vhCDR3 from the heavy chain of 6D8-1 (SEQ ID NO:659), and
[0060] ii) a light chain variable domain comprising the vlCDR1, vlCDR2, and vlCDR3 from the light chain of 6D8-1 (SEQ ID NO:663).

[0061] In some embodiments, the PVRL2 antibody used for the immunohistochemistry and/or single-cell resolution analysis is CST PVRL2 Ab (Nectin-2/CD112 (D8D3F) XP® Rabbit mAb).

[0062] In some embodiments, the PVRL2 expression level is categorized as strong, moderate, weak, or negative.

[0063] In some embodiments, the PVRL2 expression is categorized as strong or moderate.

[0064] In some embodiments, the PVRL2 expression level is categorized as 0—no signal, 1—low, 2—medium, 3—high.

[0065] In some embodiments, the PVRL2 expression is categorized as 2—medium or 3—high.

[0066] In some embodiments, the PVRL2 expression is 0% membrane staining there is predicted to be no response or a minimal response to an anti-PVRIG antibody.

[0067] In some embodiments, the PVRL2 expression is under 20% tumor membrane staining at +1 staining score there is predicted to be no response or a minimal response to an anti-PVRIG antibody.

[0068] In some embodiments, the PVRL2 expression is >20% tumor membrane staining at +1 staining score there is predicted to be a response to an anti-PVRIG antibody.

[0069] In some embodiments, the PVRL2 expression is >20% immune infiltrating cells at any intensity membrane or cytoplasmatic staining there is predicted to be a response to an anti-PVRIG antibody.

[0070] In some embodiments, the PVRL2 expression is characterized by at least two of the following
[0071] i. >20% tumor membrane staining at +1 staining score there is predicted to be no response or a minimal response to an anti-PVRIG antibody,
[0072] ii. >20% tumor membrane staining at +1 staining score there is predicted to be a response to an anti-PVRIG antibody, or
[0073] iii. >20% immune infiltrating cells at any intensity membrane or cytoplasmatic staining,
[0074] there is an increased prediction of a response to an anti-PVRIG antibody.

[0075] In some embodiments, the staining score is an IHC score.

[0076] In some embodiments, the staining score is an mIHC/IF score.

[0077] In some embodiments, a cancer patient having dendritic cells in the tumor, tumor microenvironment, and/or peripheral blood wherein at least 10%, 20%, 30%, 40%, 50%, 60%, 70%, 80%, 90%, or 100% PVRL2 expression exhibits a higher probability to respond the anti-PVRIG antibody treatment as compared to cancer patient with lower PVRL2 expression.

[0078] In some embodiments, a cancer patient having activated dendritic cells in the tumor, tumor microenvironment, and/or peripheral blood wherein at least 10%, 20%, 30%, 40%, 50%, 60%, 70%, 80%, 90%, or 100% PVRL2 expression exhibits a higher probability to respond the anti-PVRIG antibody treatment as compared to cancer patient with lower PVRL2 expression.

[0079] In some embodiments, a cancer patient having DC1 in the tumor, tumor microenvironment, and/or peripheral blood with at least 5%, 10%, 20%, 30%, 40%, 50%, 60%, 70%, 80%, 90%, or 100% PVRL2 expression exhibits a higher probability to respond the anti-PVRIG antibody treatment as compared to cancer patient with lower PVRL2 expression.

[0080] In some embodiments, a cancer patient having DC2 in the tumor, tumor microenvironment, and/or peripheral blood wherein at least 10%, 20%, 30%, 40%, 50%, 60%, 70%, 80%, 90%, or 100% PVRL2 expression exhibits a higher probability to respond the anti-PVRIG antibody treatment as compared to cancer patient with lower PVRL2 expression.

[0081] In some embodiments, a cancer patient having at least 10%, 20%, 30%, 40%, 50%, 60%, 70%, 80%, 90%, or 100% of CD8 cells in the tumor, tumor microenvironment, and/or peripheral blood expressing PVRIG exhibits a higher probability to respond to the anti-PVRIG antibody treatment as compared to cancer patient with lower PVRIG expression.

[0082] In some embodiments, a cancer patient having at least 10%, 20%, 30%, 40%, 50%, 60%, 70%, 80%, 90%, or 100% of TSCM cells in the tumor, tumor microenvironment, and/or peripheral blood expressing PVRIG exhibits a higher probability to respond to the anti-PVRIG antibody treatment as compared to cancer patient with lower PVRIG expression.

[0083] In some embodiments, a cancer patient having at least 10%, 20%, 30%, 40%, 50%, 60%, 70%, 80%, 90%, or 100% of Naïve CD8 cells in the tumor, tumor microenvironment, and/or peripheral blood expressing PVRIG exhibits a higher probability to respond to the anti-PVRIG antibody treatment as compared to cancer patient with lower PVRIG expression.

[0084] In some embodiments, a cancer patient having at least 10%, 20%, 30%, 40%, 50%, 60%, 70%, 80%, 90%, or 100% of exhausted CD8 cells in the tumor, tumor microenvironment, and/or peripheral blood expressing PVRIG exhibits a higher probability to respond to the anti-PVRIG antibody treatment as compared to cancer patient with lower PVRIG expression.

[0085] In some embodiments, a cancer patient having at least 5%, 10%, 20%, 30%, 40%, 50%, 60%, 70%, 80%, 90%, or 100% of TRM cells in the tumor, tumor microenvironment, and/or peripheral blood expressing PVRIG exhibits a higher probability to respond to the anti-PVRIG antibody treatment as compared to cancer patient with lower PVRIG expression.

[0086] In some embodiments, a cancer patient having at least 5%, 10%, 20%, 30%, 40%, 50%, 60%, 70%, 80%, 90%, or 100% of effector cells in the tumor, tumor microenvironment, and/or peripheral blood expressing PVRIG exhibits a higher probability to respond to the anti-PVRIG antibody treatment as compared to cancer patient with lower PVRIG expression.

[0087] In some embodiments, a cancer patient having more than 2 copies of PVRL2 in cells obtained from the tumor, tumor microenvironment, and/or peripheral blood exhibits a higher probability to respond to the anti-PVRIG antibody treatment as compared to cancer patient with only 2 copies of PVRL2 in cells obtained from the tumor, tumor microenvironment, and/or peripheral blood.

[0088] In some embodiments, the anti-PVRIG treatment antibody is administered as a stable liquid pharmaceutical formulation of the anti-PVRIG antibody comprising:
[0089] (a) an anti-PVRIG antibody, wherein the anti-PVRIG antibody comprises:
   [0090] i) a heavy chain variable domain comprising the vhCDR1, vhCDR2, and vhCDR3 from the heavy chain of CHA.7.518.1.H4(S241P) (SEQ ID NO:8), and
   [0091] ii) a light chain variable domain comprising the vlCDR1, vlCDR2, and vlCDR3 from the light chain of CHA.7.518.1.H4(S241P) (SEQ ID NO:13);
[0092] (b) from 10 mM to 100 mM histidine;
[0093] (c) from 30 mM to 100 mM NaCl;
[0094] (d) from 20 mM to 150 mM L-Arginine; and
[0095] (e) from 0.005% to 0.1% w/v polysorbate 80,
[0096] wherein the composition has a pH from 5.5 to 7.0.

[0097] In some embodiments, the anti-PVRIG treatment antibody comprises a CH1-hinge-CH2-CH3 sequence of IgG4 (SEQ ID NO:657 or SEQ ID NO:658), wherein the hinge region optionally comprises mutations.

[0098] In some embodiments, the anti-PVRIG antibody comprises the CH1-hinge-CH2-CH3 region from IgG1, IgG2, IgG3, or IgG4, wherein the hinge region optionally comprises mutations.

[0099] In some embodiments, the heavy chain variable domain is from the heavy chain of CHA.7.518.1.H4(S241P) (SEQ ID NO:8) and the light chain variable domain is from the light chain of CHA.7.518.1.H4(S241P) (SEQ ID NO:13).

[0100] In some embodiments, the anti-PVRIG antibody comprises a CL region of human kappa 2 light chain.

[0101] In some embodiments, the stable liquid formulation comprises from 10 mM to 80 mM histidine, from 15 mM to 70 mM histidine, from 20 mM to 60 mM histidine, from 20 mM to 50 mM histidine, or from 20 mM to 30 mM histidine.

[0102] In some embodiments, the pharmaceutical formulation comprises about 25 mM histidine.

[0103] In some embodiments, the pharmaceutical formulation comprises from 30 mM to 100 mM NaCl, from 30 mM to 90 mM NaCl, from 40 mM to 80 mM NaCl, from 30 mM to 70 mM histidine, or from 45 mM to 70 mM NaCl.

[0104] In some embodiments, the pharmaceutical formulation comprises about 60 mM NaCl.

[0105] In some embodiments, the pharmaceutical formulation comprises from 20 mM to 140 mM L-arginine, from 30 mM to 140 mM L-arginine, from 40 mM to 130 mM L-arginine, from 50 mM to 120 mM L-arginine, from 60 mM to 110 mM L-arginine, from 70 mM to 110 mM L-arginine, from 80 mM to 110 mM L-arginine, or from 90 mM to 110 mM L-arginine.

[0106] In some embodiments, the pharmaceutical formulation comprises about 100 mM L-arginine.

[0107] In some embodiments, the pharmaceutical formulation comprises from 0.006% to 0.1% w/v polysorbate 80, from 0.007% to 0.09% w/v polysorbate 80, from 0.008% to 0.08% w/v polysorbate 80, from 0.009% to 0.09% w/v polysorbate 80, from 0.01% to 0.08% w/v polysorbate 80, from 0.01% to 0.07% w/v polysorbate 80, from 0.01% to 0.07% w/v polysorbate 80, or from 0.01% to 0.06% w/v polysorbate 80, or from 0.009% to 0.05% w/v polysorbate 80.

[0108] In some embodiments, the pharmaceutical formulation comprises about 0.01% polysorbate 80.

[0109] In some embodiments, the pH is from 6 to 7.0.

[0110] In some embodiments, the pH is from 6.3 to 6.8.

[0111] In some embodiments, the pH is 6.5+/−0.2.

[0112] In some embodiments, the anti-PVRIG antibody is at a concentration of from 10 mg/mL to 40 mg/mL, 15 mg/mL to 40 mg/mL, 15 mg/mL to 30 mg/mL, 10 mg/mL to 25 mg/mL, or 15 mg/mL to 25 mg/mL.

[0113] In some embodiments, the anti-PVRIG antibody is at a concentration of about 20 mg/mL.

[0114] In some embodiments, the anti-PVRIG antibody formulation comprises:
[0115] a) a heavy chain comprising:
   [0116] i) a VH-CH1-hinge-CH2-CH3, wherein the VH is from CHA.7.518.1.H4(S241P) (SEQ ID NO:4) and wherein the CH1-hinge-CH2-CH3 region is from IgG4; and
[0117] b) a light chain comprising:
   [0118] i) a VL-CL, wherein the VL from CHA.7.518.1.H4(S241P) (SEQ ID NO:9) and wherein the CL region is from human kappa 2 light chain.

[0119] In some embodiments, the hinge region optionally comprises mutations.

[0120] In some embodiments, the hinge region optionally comprises mutations.

[0121] In some embodiments, the anti-PVRIG antibody formulation comprises:
[0122] i) a heavy chain comprising the heavy chain from CHA.7.518.1.H4(S241P) (SEQ ID NO:8); and
[0123] ii) a light chain comprising the light chain from CHA.7.518.1.H4(S241P) (SEQ ID NO:13).

[0124] In some embodiments, the anti-PVRIG antibody formulation comprising:
[0125] (a) an anti-PVRIG antibody, wherein the anti-PVRIG antibody comprises:
   [0126] i) a heavy chain variable domain comprising the vhCDR1, vhCDR2, and vhCDR3 from the heavy chain of CHA.7.518.1.H4(S241P) (SEQ ID NO:8), and
   [0127] ii) a light chain variable domain comprising the vlCDR1, vlCDR2, and vlCDR3 from the light chain of CHA.7.518.1.H4(S241P) (SEQ ID NO:13);
[0128] (b) about 25 mM histidine;
[0129] (c) about 60 mM NaCl;
[0130] (d) about 100 mM L-Arginine; and
[0131] (e) about 0.01% % w/v polysorbate 80,
[0132] wherein the composition has a pH from 6.5+/−0.2.

[0133] In some embodiments, the anti-PVRIG antibody formulation comprising:
[0134] (a) an anti-PVRIG antibody, wherein the anti-PVRIG antibody comprises:
   [0135] i) a heavy chain comprising the heavy chain from CHA.7.518.1.H4(S241P) (SEQ ID NO:8); and
   [0136] ii) a light chain comprising the light chain from CHA.7.518.1.H4(S241P) (SEQ ID NO:13);
[0137] (b) about 25 mM histidine;
[0138] (c) about 60 mM NaCl;
[0139] (d) about 100 mM L-Arginine; and
[0140] (e) about 0.01% % w/v polysorbate 80,
   wherein the composition has a pH from 6.5+/−0.2.

[0141] In some embodiments, the anti-PVRIG treatment antibody is administered at a dosage of about 0.01 mg/kg to about 20 mg/kg of the anti-PVRIG antibody or about 0.01 mg/kg to about 10 mg/kg of the anti-PVRIG antibody.

[0142] In some embodiments, the anti-PVRIG treatment antibody is administered at a dosage of about 0.01 mg/kg, 0.03 mg/kg, 0.1 mg/kg, 0.3 mg/kg, 1 mg/kg, 3 mg/kg, 10 mg/kg, or 20 mg/kg of the anti-PVRIG antibody.

[0143] In some embodiments, the anti-PVRIG treatment antibody is administered 20 mg/kg every 4 weeks.

[0144] In some embodiments, the cancer selected from the group consisting of prostate cancer, liver cancer (HCC), colorectal cancer (CRC), colorectal cancer MSS (MSS-CRC; including refractory MSS colorectal), CRC (MSS unknown), ovarian cancer (including ovarian carcinoma), endometrial cancer (including endometrial carcinoma), breast cancer, pancreatic cancer, stomach cancer, cervical cancer, head and neck cancer, thyroid cancer, testis cancer, urothelial cancer, lung cancer, melanoma, non-melanoma skin cancer (squamous and basal cell carcinoma), glioma, renal cell cancer (RCC), renal cell carcinoma (RCC), lymphoma (non-Hodgkins' lymphoma (NHL) and Hodgkin's lymphoma (HD)), Acute myeloid leukemia (AML), T cell Acute Lymphoblastic Leukemia (T-ALL), Diffuse Large B cell lymphoma, testicular germ cell tumors, mesothelioma, esophageal cancer, triple negative breast cancer, Merkel Cells cancer, MSI-high cancer, KRAS mutant tumors, adult T-cell leukemia/lymphoma, pleural mesothelioma, anal SCC, neuroendocrine lung cancer (including neuroendocrine lung carcinoma), NSCLC, NSCL (large cell), NSCLC large cell, NSCLC squamous cell, cervical SCC, malignant melanoma, pancreatic cancer, pancreatic adenocarcinoma, adenoid cystic cancer (including adenoid cystic carcinoma), primary peritoneal cancer, microsatellite stable primary peritoneal cancer, platinum resistant microsatellite stable primary peritoneal cancer, Myelodysplastic syndromes (MDS), HNSCC, PD1 refractory or relapsing cancer, gastroesophageal junction cancer, gastric cancer, and/or fallopian tube cancer.

[0145] In some embodiments, the anti-PVRIG antibody is administered in combination with an anti-PD-1 antibody.

[0146] In some embodiments, the anti-PVRIG antibody is administered in combination with an anti-PD-L1 antibody.

[0147] In some embodiments, the anti-PVRIG antibody is administered in combination with an anti-TIGIT antibody.

[0148] In some embodiments, the anti-PVRIG antibody is administered in combination with an anti-PD-1 antibody and an anti-TIGIT antibody.

[0149] In some embodiments, the anti-PVRIG antibody is administered in combination with an anti-PD-L1 antibody and an anti-TIGIT antibody.

[0150] In some embodiments, the anti-PD1 antibody is selected from the group consisting of nivolumab and pembrolizumab.

[0151] In some embodiments, the anti-PD-L1 antibody is selected from the group consisting of atezolizumab, avelumab, durvalumab, KN035 (Envafolimab), and CK-301 (Cosibelimab).

[0152] In some embodiments, the anti-TIGIT antibody comprises the vhCDR1, vhCDR2, vhCDR3, vlCDR1, vlCDR2, and vlCDR3 sequences from an antibody selected from the group consisting of CPA.9.083.H4(S241P), CPA.9.086.H4(S241P), CPA.9.018, CPA.9.027, CPA.9.049, CPA.9.057, CPA.9.059, CPA.9.083, CPA.9.086, CPA.9.089, CPA.9.093, CPA.9.101, CPA.9.103, CHA.9.536.3.1, CHA.9.536.3, CHA.9.536.4, CHA.9.536.5, CHA.9.536.7, CHA.9.536.8, CHA.9.560.1, CHA.9.560.3, CHA.9.560.4, CHA.9.560.5, CHA.9.560.6, CHA.9.560.7, CHA.9.560.8, CHA.9.546.1, CHA.9.547.1, CHA.9.547.2, CHA.9.547.3, CHA.9.547.4, CHA.9.547.6, CHA.9.547.7, CHA.9.547.8, CHA.9.547.9, CHA.9.547.13, CHA.9.541.1, CHA.9.541.3, CHA.9.541.4, CHA.9.541.5, CHA.9.541.6, CHA.9.541.7, and CHA.9.541.8.

[0153] In some embodiments, the anti-TIGIT antibody comprises the variable heavy domain and the variable light domain sequences from an antibody selected from the group consisting of CPA.9.083.H4(S241P), CPA.9.086.H4(S241P), CPA.9.018, CPA.9.027, CPA.9.049, CPA.9.057, CPA.9.059, CPA.9.083, CPA.9.086, CPA.9.089, CPA.9.093, CPA.9.101, CPA.9.103, CHA.9.536.3.1, CHA.9.536.3, CHA.9.536.4, CHA.9.536.5, CHA.9.536.7, CHA.9.536.8, CHA.9.560.1, CHA.9.560.3, CHA.9.560.4, CHA.9.560.5, CHA.9.560.6, CHA.9.560.7, CHA.9.560.8, CHA.9.546.1, CHA.9.547.1, CHA.9.547.2, CHA.9.547.3, CHA.9.547.4, CHA.9.547.6, CHA.9.547.7, CHA.9.547.8, CHA.9.547.9, CHA.9.547.13, CHA.9.541.1, CHA.9.541.3, CHA.9.541.4, CHA.9.541.5, CHA.9.541.6, CHA.9.541.7, and CHA.9.541.8.

[0154] In some embodiments, the anti-TIGIT antibody is selected from the group consisting of CPA.9.083.H4(S241P) and CPA.9.086.H4(S241P).

[0155] In some embodiments, the anti-TIGIT antibody comprises:
[0156] a) a heavy chain comprising VH-CH1-hinge-CH2-CH3; and
[0157] b) a light chain comprising VL-VC, wherein VC is either kappa or lambda.

[0158] In some embodiments, the CH1-hinge-CH2-CH3 is selected from human IgG1, IgG2 and IgG4, and variants thereof.

[0159] In some embodiments, the anti-PVRIG antibody is CHA.7.518.1.H4(S241P), the anti-TIGIT antibody is CPA.9.086.H4(S241P) and the anti-PD-1 antibody is nivolumab.

[0160] In some embodiments, the anti-PVRIG antibody is CHA.7.518.1.H4(S241P), the anti-TIGIT antibody is CPA.9.083.H4(S241P) and the anti-PD-1 antibody is nivolumab.

[0161] In some embodiments, the anti-PVRIG antibody is CHA.7.518.1.H4(S241P), the anti-TIGIT antibody is CPA.9.086.H4(S241P) and the anti-PD-1 antibody is pembrolizumab.

[0162] In some embodiments, the anti-PVRIG antibody is CHA.7.518.1.H4(S241P), the anti-TIGIT antibody is CPA.9.083.H4(S241P) and the anti-PD-1 antibody is pembrolizumab.

[0163] In some embodiments, the anti-PVRIG antibody is CHA.7.538.1.2.H4(S241P), the anti-TIGIT antibody is CPA.9.086.H4(S241P) and the anti-PD-1 antibody is nivolumab.

[0164] In some embodiments, the anti-PVRIG antibody is CHA.7.538.1.2.H4(S241P), the anti-TIGIT antibody is CPA.9.083.H4(S241P) and the anti-PD-1 antibody is nivolumab.

[0165] In some embodiments, the anti-PVRIG antibody is CHA.7.538.1.2.H4(S241P), the anti-TIGIT antibody is CPA.9.086.H4(S241P) and the anti-PD-1 antibody is pembrolizumab.

[0166] In some embodiments, the anti-PVRIG antibody is CHA.7.538.1.2.H4(S241P), the anti-TIGIT antibody is CPA.9.083.H4(S241P) and the anti-PD-1 antibody is pembrolizumab.

[0167] In some embodiments, the anti-PVRIG antibody is CHA.7.518.1.H4(S241P), the anti-TIGIT antibody is CPA.9.086.H4(S241P) and the anti-PD-L1 antibody is atezolizumab.

[0168] In some embodiments, the anti-PVRIG antibody is CHA.7.518.1.H4(S241P), the anti-TIGIT antibody is CPA.9.086.H4(S241P) and the anti-PD-L1 antibody is avelumab.

[0169] In some embodiments, the anti-PVRIG antibody is CHA.7.518.1.H4(S241P), the anti-TIGIT antibody is CPA.9.086.H4(S241P) and the anti-PD-L1 antibody is durvalumab.

[0170] In some embodiments, the anti-PVRIG antibody is CHA.7.518.1.H4(S241P), the anti-TIGIT antibody is CPA.9.086.H4(S241P) and the anti-PD-L1 antibody is KN035(Envafolimab).

[0171] In some embodiments, the anti-PVRIG antibody is CHA.7.518.1.H4(S241P), the anti-TIGIT antibody is CPA.9.086.H4(S241P) and the anti-PD-L1 antibody is CK-301 (Cosibelimab).

[0172] In some embodiments, the anti-PVRIG antibody is CHA.7.538.1.2.H4(S241P), the anti-TIGIT antibody is CPA.9.086.H4(S241P) and the anti-PD-L1 antibody is atezolizumab.

[0173] In some embodiments, the anti-PVRIG antibody is CHA.7.538.1.2.H4(S241P), the anti-TIGIT antibody is CPA.9.086.H4(S241P) and the anti-PD-L1 antibody is avelumab.

[0174] In some embodiments, the anti-PVRIG antibody is CHA.7.538.1.2.H4(S241P), the anti-TIGIT antibody is CPA.9.086.H4(S241P) and the anti-PD-L1 antibody is durvalumab.

[0175] In some embodiments, the anti-PVRIG antibody is CHA.7.538.1.2.H4(S241P), the anti-TIGIT antibody is CPA.9.086.H4(S241P) and the anti-PD-L1 antibody is KN035(Envafolimab).

[0176] In some embodiments, the anti-PVRIG antibody is CHA.7.538.1.2.H4(S241P), the anti-TIGIT antibody is CPA.9.086.H4(S241P) and the anti-PD-L1 antibody is CK-301 (Cosibelimab).

[0177] In some embodiments, the anti-PVRIG antibody is CHA.7.518.1.H4(S241P), the anti-TIGIT antibody is CPA.9.083.H4(S241P) and the anti-PD-L1 antibody is atezolizumab.

[0178] In some embodiments, the anti-PVRIG antibody is CHA.7.518.1.H4(S241P), the anti-TIGIT antibody is CPA.9.083.H4(S241P) and the anti-PD-L1 antibody is avelumab.

[0179] In some embodiments, the anti-PVRIG antibody is CHA.7.518.1.H4(S241P), the anti-TIGIT antibody is CPA.9.083.H4(S241P) and the anti-PD-L1 antibody is durvalumab.

[0180] In some embodiments, the anti-PVRIG antibody is CHA.7.518.1.H4(S241P), the anti-TIGIT antibody is CPA.9.083.H4(S241P) and the anti-PD-L1 antibody is KN035(Envafolimab).

[0181] In some embodiments, the anti-PVRIG antibody is CHA.7.518.1.H4(S241P), the anti-TIGIT antibody is CPA.9.083.H4(S241P) and the anti-PD-L1 antibody is CK-301 (Cosibelimab).

[0182] In some embodiments, the anti-PVRIG antibody is CHA.7.538.1.2.H4(S241P), the anti-TIGIT antibody is CPA.9.083.H4(S241P) and the anti-PD-L1 antibody is atezolizumab.

[0183] In some embodiments, the anti-PVRIG antibody is CHA.7.538.1.2.H4(S241P), the anti-TIGIT antibody is CPA.9.083.H4(S241P) and the anti-PD-L1 antibody is avelumab.

[0184] In some embodiments, the anti-PVRIG antibody is CHA.7.538.1.2.H4(S241P), the anti-TIGIT antibody is CPA.9.083.H4(S241P) and the anti-PD-L1 antibody is durvalumab.

[0185] In some embodiments, the anti-PVRIG antibody is CHA.7.538.1.2.H4(S241P), the anti-TIGIT antibody is CPA.9.083.H4(S241P) and the anti-PD-L1 antibody is KN035(Envafolimab).

[0186] In some embodiments, the anti-PVRIG antibody is CHA.7.538.1.2.H4(S241P), the anti-TIGIT antibody is CPA.9.083.H4(S241P) and the anti-PD-L1 antibody is CK-301 (Cosibelimab).

[0187] The present invention also provides an agent for use in a method, including a method of treatment, wherein the agent is capable of blocking the interaction between PVRIG and PVRL2.

[0188] In some embodiments, the agent capable of blocking the interaction between PVRIG and PVRL2 comprises an anti-PVRIG antibody.

[0189] In some embodiments, the agent capable of blocking the interaction between PVRIG and PVRL2 increases the interaction between PVRL2 with DNAM-1 by:
[0190] i) reducing the competition between PVRIG and DNAM-1 for binding to PVRL2 by between about 1-fold to about 10-fold.

[0191] In some embodiments, the blocking reduces the competition between PVRIG and DNAM-1 for binding to PVRL2 and/or increases the interaction between PVRL2 and DNAM-1, as compared to a control or a patient that is not treated with the agent capable of blocking the interaction between PVRIG and PVRL2.

[0192] The present invention also provides for a method for determining a cancer patient population for treatment with an anti-PVRIG antibody, the method comprising:
[0193] (d) detecting the presence of DNAM-1 and/or PVRIG in a biological sample from the cancer patient;
[0194] (e) quantitating the measurement of the level of DNAM-1 and/or PVRIG; and
[0195] (f) treating the cancer patient with an anti-PVRIG antibody when PVRIG in (a) as quantitated in step (b) are present and/or present at an increased level as compared to a control or a patient that does not have detectable levels of DNAM-1 and/or PVRIG.

[0196] The present invention also provides for a method for predicting or determining the efficacy of treatment for a cancer patient with an anti-PVRIG treatment antibody, the method comprising:
[0197] (a) measuring the level of DNAM-1 and/or PVRIG;
[0198] (b) quantitating the measurement of the level of DNAM-1 and/or PVRIG; and
[0199] (c) correlating the level of the DNAM-1 and/or PVRIG with the efficacy of treatment, wherein any of DNAM-1 and/or PVRIG being present and/or being present at an increased level as compared to a control or a patient that does not have detectable levels of DNAM-1 and/or PVRIG, is indicative of treatment efficacy for treatment with an anti-PVRIG treatment antibody.

[0200] In some embodiments, the method further comprises:
[0201] (d) treating the cancer patient with an anti-PVRIG antibody when DNAM-1 and/or PVRIG in (a) are present at an increased level as compared to a control or a patient that does not have detectable levels of the cells.

[0202] In some embodiments, the biological sample comprises immune cells.

[0203] In some embodiments, the immune cells are selected from the group consisting of NK cells, NKT cells, gamma-delta T cells, T cells, CD4 positive T cells, and CD8 positive T cells.

[0204] In some embodiments, the immune cells are NK cells, NKT cells, and/or gamma-delta T cells.

[0205] In some embodiments, the immune cells are selected from the group consisting of CD4 positive T cells and CD8 positive T cells.

[0206] In some embodiments, the T cells are selected from the group consisting of TSCM, TRM, naïve, exhausted, cycling, memory, effector CD8 positive cells, and effector CD4 positive T cells.

[0207] In some embodiments, the immune cells co-express PVRIG and DNAM-1.

[0208] The present invention also provides for a method for predicting or determining the efficacy of treatment or determining a population for treatment with an anti-PVRIG treatment antibody when the immune cells that express DNAM-1 and/or PVRIG comprise at least 0.1%, at least 0.5%, at least 1%, at least 1.5%, at least 2%, at least 2.5%, at least 3%, at least 3.5%, at least 4%, at least 4.5%, at least 5%, at least 10%, at least 15%, at least 20%, at least 25%, at least 30%, at least 35%, at least 40%, at least 45%, at least 50%, at least 55%, at least 60%, at least 65%, at least 70%, at least 75%, at least 80%, or at least 85% of the total immune cells in the biological sample is indicative of treatment efficacy and/or indicative for treatment with an anti-PVRIG antibody.

[0209] The present invention also provides for a method for predicting or determining the efficacy of treatment or determining a population for treatment with an anti-PVRIG treatment antibody when the T cells, NK cells, and NKT cells in the immune cells that express DNAM-1 and/or PVRIG comprise at least 0.1%, at least 0.2%, at least 0.3%, at least 0.4%, at least 0.5%, at least 0.6%, at least 0.7%, at least 0.8%, at least 0.9%, at least 1%, at least 1.5%, at least 2%, at least 2.5%, at least 3%, at least 3.5%, at least 4%, at least 4.5%, or at least 5%, at least 10%, at least 15%, at least 20%, at least 25%, or at least 30%, out of total T cells, NK cells, and NKT cells in the biological sample is indicative of treatment efficacy and/or indicative for treatment with an anti-PVRIG antibody.

[0210] In some embodiments, the presence of and/or an increased level as compared to an untreated control and/or to a control prior to treatment of DNAM-1 and/or PVRIG, is indicative and/or predictive of anti-PVRIG treatment efficacy.

[0211] In some embodiments, the biological sample is obtained from a tumor, tumor microenvironment, and/or peripheral blood from the cancer patient.

[0212] The present invention also provides for a method for determining a cancer patient population for treatment with an anti-PVRIG treatment antibody, the method comprising:
[0213] (a) measuring the level of PVRIG and/or DNAM-1 expression in a biological sample obtained from a cancer and/or tumor microenvironment and/or peripheral blood in the cancer patient,
[0214] (b) quantitating the measurement of the level of PVRIG and/or DNAM-1 expression in the biological sample, and
[0215] (c) treating the cancer patient with an anti-PVRIG antibody wherein PVRIG and/or DNAM-1 is expressed and/or expressed at an increased level as compared to a control or a patient that does not have detectable levels of the PVRIG and/or DNAM-1 in the biological sample.

[0216] The present invention also provides for a method for predicting or determining the efficacy of treatment for a cancer patient with an anti-PVRIG treatment antibody, the method comprising:
[0217] (a) measuring the level of PVRIG and/or DNAM-1 expression in a biological sample obtained from a cancer and/or tumor microenvironment and/or peripheral blood in the cancer patient,
[0218] (b) quantitating the measurement of the level of PVRIG and/or DNAM-1 expression in the biological sample, and
[0219] (c) correlating the level of PVRIG and/or DNAM-1 with the efficacy of treatment, wherein PVRIG and/or DNAM-1 is expressed and/or expressed at an increased level as compared to a control or a patient that does not have detectable levels of the PVRIG and/or DNAM-1, is indicative of treatment efficacy for treatment with an anti-PVRIG treatment antibody.

[0220] The present invention also provides for a method for altering the regimen of treatment for a patient with cancer, the method comprising:
[0221] (a) measuring the level of PVRIG and/or DNAM-1 expression in a biological sample obtained from a cancer and/or tumor microenvironment and/or peripheral blood in the cancer patient,
[0222] (b) quantitating the measurement of the level of PVRIG and/or DNAM-1 expression in the biological sample, wherein PVRIG and/or DNAM-1 being expressed and/or being expressed at an increased level as compared to a control or a patient that does not have detectable levels of the PVRIG and/or DNAM-1 is indicative of treatment efficacy,
[0223] (c) correlating the level of PVRIG and/or DNAM-1 expression with the efficacy of treatment, wherein a high level of PVRIG and/or DNAM-1 expression is indicative of altering the treatment regimen for treatment with anti-PVRIG treatment antibody, and
[0224] (d) altering the treatment regimen to include an anti-PVRIG antibody when a moderate or high level of PVRIG and/or DNAM-1 expression is measured.

[0225] In some embodiments, the anti-PVRIG antibody comprises the vhCDR1, vhCDR2, vhCDR3, vlCDR1, vlCDR2, and vlCDR3 sequences from an antibody selected from the group consisting of CHA.7.502, CHA.7.503, CHA.7.506, CHA.7.508, CHA.7.510, CHA.7.512, CHA.7.514, CHA.7.516, CHA.7.518.1.H4(S241P), CHA.7.518, CHA.7.520.1, CHA.7.520.2, CHA.7.522, CHA.7.524, CHA.7.526, CHA.7.527, CHA.7.528, CHA.7.530, CHA.7.534, CHA.7.535, CHA.7.537, CHA.7.538.1.2.H4(S241P), CHA.7.538.1, CHA.7.538.2, CHA.7.543, CHA.7.544, CHA.7.545, CHA.7.546, CHA.7.547, CHA.7.548, CHA.7.549, CHA.7.550, CPA.7.001, CPA.7.003, CPA.7.004, CPA.7.006, CPA.7.008, CPA.7.009, CPA.7.010, CPA.7.011, CPA.7.012, CPA.7.013, CPA.7.014, CPA.7.015, CPA.7.017, CPA.7.018, CPA.7.019, CPA.7.021, CPA.7.022, CPA.7.023, CPA.7.024, CPA.7.033, CPA.7.034, CPA.7.036, CPA.7.040, CPA.7.046, CPA.7.047, CPA.7.049, and CPA.7.050.

[0226] In some embodiments, the anti-PVRIG antibody comprises the variable heavy domain and the variable light domain sequences from an antibody selected from the group consisting of CHA.7.502, CHA.7.503, CHA.7.506, CHA.7.508, CHA.7.510, CHA.7.512, CHA.7.514, CHA.7.516, CHA.7.518.1.H4(S241P), CHA.7.518, CHA.7.518.1, CHA.7.518.2, CHA.7.518.3, CHA.7.518.4, CHA.7.518.5, CHA.7.520.1, CHA.7.520.2, CHA.7.522, CHA.7.524, CHA.7.524.1, CHA.7.524.2, CHA.7.524.3, CHA.7.524.4, CHA.7.526, CHA.7.527, CHA.7.528, CHA.7.530, CHA.7.530.1, CHA.7.530.2, CHA.7.530.3, CHA.7.530.4, CHA.7.530.5, CHA.7.534, CHA.7.535, CHA.7.537, CHA.7.538.1.2.H4(S241P), CHA.7.538.1, CHA.7.538.1.1, CHA.7.538.1.2, CHA.7.538.1.3, CHA.7.538.1.4, CHA.7.538.2, CHA.7.538.2.1, CHA.7.538.2.2, CHA.7.538.2.3, CHA.7.543, CHA.7.544, CHA.7.545, CHA.7.546, CHA.7.547, CHA.7.548, CHA.7.549, CHA.7.550, CPA.7.001, CPA.7.003, CPA.7.004, CPA.7.006, CPA.7.008, CPA.7.009, CPA.7.010, CPA.7.011, CPA.7.012, CPA.7.013, CPA.7.014, CPA.7.015, CPA.7.017, CPA.7.018, CPA.7.019, CPA.7.021, CPA.7.022, CPA.7.023, CPA.7.024, CPA.7.033, CPA.7.034, CPA.7.036, CPA.7.040, CPA.7.046, CPA.7.047, CPA.7.049, and CPA.7.050.

[0227] In some embodiments, the anti-PVRIG treatment antibody comprises a heavy chain variable domain from the heavy chain of CHA.7.518.1.H4(S241P) (SEQ ID NO:8) and a light chain variable domain from the light chain of CHA.7.518.1.H4(S241P) (SEQ ID NO:13).

[0228] In some embodiments, the anti-PVRIG treatment antibody comprises a heavy chain variable domain from the heavy chain of CHA.7.538.1.2.H4(S241P) (SEQ ID NO:266) and a light chain variable domain from the light chain of CHA.7.538.1.2.H4(S241P) (SEQ ID NO:271).

[0229] In some embodiments, the PVRIG and/or DNAM-1 expression is determined using single-cell resolution analysis.

[0230] In some embodiments, the single-cell resolution analysis includes RNAseq, immunohistochemistry (IHC), multiplex immunohistochemistry (mIHC) and/or immunofluorescence (IF), flow cytometry (e.g., FACS) and mass cytometry (e.g., CyTOF), as well as combinations thereof.

[0231] In some embodiments, the PVRIG and/or DNAM-1 expression is determined using immunohistochemistry.

[0232] In some embodiments, the anti-PVRIG antibody is used for the single-cell resolution analysis and/or immunohistochemistry, and wherein the anti-PVRIG antibody is AB-635 PVRIG Ab (6D8-1 clone).

[0233] In some embodiments, the anti-PVRIG antibody is used for the single-cell resolution analysis and/or immunohistochemistry, and wherein the anti-PVRIG antibody is 6D8-1 (heavy chain SEQ ID NO:659 and light chain SEQ ID NO:663).

[0234] In some embodiments, the anti-PVRIG antibody is used for the single-cell resolution analysis and/or immunohistochemistry, and wherein the PVRIG antibody used for the single-cell resolution analysis and/or immunohistochemistry comprises:
[0235] i) a heavy chain variable domain comprising the vhCDR1, vhCDR2, and vhCDR3 from the heavy chain of 6D8-1 (SEQ ID NO:659), and
[0236] ii) a light chain variable domain comprising the vlCDR1, vlCDR2, and vlCDR3 from the light chain of 6D8-1 (SEQ ID NO:663).

[0237] In some embodiments, the anti-DNAM-1 antibody is used for the single-cell resolution analysis and/or immunohistochemistry, and wherein the DNAM-1 antibody used for the immunohistochemistry analysis is selected from the group consisting of DNAM-1/CD226 (E8L9G) XP® Rabbit mAb #66631, Mouse Anti-CD226 Recombinant Antibody (clone MM0248-1X20), Cluster of Differentiation 226 (CD226) Antibody abx171784, and Recombinant Anti-CD226 antibody [EPR20710] (ab212077).

[0238] In some embodiments, the DNAM-1 expression level is categorized as strong, moderate, weak, or negative.

[0239] In some embodiments, the DNAM-1 expression is categorized as strong or moderate.

[0240] In some embodiments, the DNAM-1 expression level is categorized as 0—no signal, 1—low, 2—medium, 3—high.

[0241] In some embodiments, the DNAM-1 expression is categorized as 2—medium or 3—high.

[0242] In some embodiments, the cancer patient having immune cells in the tumor, tumor microenvironment, and/or peripheral blood having at least 3%, 5%, 10%, 20%, 30%, 40%, 50%, 60%, 70%, 80%, 90%, or 100% DNAM-1 expression exhibits a higher probability to respond the anti-PVRIG antibody treatment as compared to a cancer patient with lower DNAM-1 expression.

[0243] In some embodiments, the cancer patient having CD4 positive T cells and/or CD8 positive T cells in the tumor, tumor microenvironment, and/or peripheral blood having at least 3%, 5%, 10%, 20%, 30%, 40%, 50%, 60%, 70%, 80%, 90%, or 100% DNAM-1 expression exhibits a higher probability to respond the anti-PVRIG antibody treatment as compared to a cancer patient with lower DNAM-1 expression

[0244] In some embodiments, the cancer patient having at least 3%, 5%, 10%, 20%, 30%, 40%, 50%, 60%, 70%, 80%, 90%, or 100% of CD4 positive T cells and/or CD8 positive T cells in the tumor, tumor microenvironment, and/or peripheral blood expressing PVRIG and DNAM-1 exhibits a higher probability to respond to the anti-PVRIG antibody treatment as compared to a cancer patient with lower PVRIG and/or DNAM-1 expression.

[0245] In some embodiments, the cancer patient having at least 3%, 5%, 10%, 20%, 30%, 40%, 50%, 60%, 70%, 80%, 90%, or 100% of effector CD8 and/or CD4 positive T cells in the tumor, tumor microenvironment, and/or peripheral blood expressing PVRIG and DNAM-1 exhibits a higher probability to respond to the anti-PVRIG antibody treatment as compared to cancer patient with lower PVRIG and/or DNAM-1 expression.

[0246] In some embodiments, the cancer patient having more than 2 copies of DNAM-1 in cells obtained from the tumor, tumor microenvironment, and/or peripheral blood exhibits a higher probability to respond to the anti-PVRIG antibody treatment as compared to cancer patient with only 2 copies of DNAM-1 in cells obtained from the tumor, tumor microenvironment, and/or peripheral blood.

[0247] In some embodiments, the immune cells are NK cells, NKT cells, and/or gamma-delta T cells.

[0248] In some embodiments, the immune cells are CD4 positive T cells and/or CD8 positive T cells.

[0249] In some embodiments, the T cells are selected from the group consisting of TSCM, TRM, naïve, exhausted, cycling, memory, effector CD8 positive T cells, and effector CD4 positive T cells.

[0250] In some embodiments, the anti-PVRIG treatment antibody is administered as a stable liquid pharmaceutical formulation of the anti-PVRIG antibody comprising:
[0251] (a) an anti-PVRIG antibody, wherein the anti-PVRIG antibody comprises:
   [0252] i) a heavy chain variable domain comprising the vhCDR1, vhCDR2, and vhCDR3 from the heavy chain of CHA.7.518.1.H4(S241P) (SEQ ID NO:8), and
   [0253] ii) a light chain variable domain comprising the vlCDR1, vlCDR2, and vlCDR3 from the light chain of CHA.7.518.1.H4(S241P) (SEQ ID NO:13);
[0254] (b) from 10 mM to 100 mM histidine;
[0255] (c) from 30 mM to 100 mM NaCl;
[0256] (d) from 20 mM to 150 mM L-Arginine; and
[0257] (e) from 0.005% to 0.1% w/v polysorbate 80,
[0258] wherein the composition has a pH from 5.5 to 7.0.

[0259] In some embodiments, the anti-PVRIG treatment antibody comprises a CH1-hinge-CH2-CH3 sequence of IgG4 (SEQ ID NO:657 or SEQ ID NO:658), wherein the hinge region optionally comprises mutations.

[0260] In some embodiments, the anti-PVRIG antibody comprises a CH1-hinge-CH2-CH3 region from IgG1, IgG2, IgG3, or IgG4, wherein the hinge region optionally comprises mutations.

[0261] In some embodiments, the heavy chain variable domain of the anti-PVRIG antibody is from the heavy chain of CHA.7.518.1.H4(S241P) (SEQ ID NO:8) and the light chain variable domain of the anti-PVRIG antibody is from the light chain of CHA.7.518.1.H4(S241P) (SEQ ID NO:13).

[0262] In some embodiments, the anti-PVRIG antibody comprises a CL region of human kappa 2 light chain.

[0263] In some embodiments, the stable liquid formulation comprises from 10 mM to 80 mM histidine, from 15 mM to 70 mM histidine, from 20 mM to 60 mM histidine, from 20 mM to 50 mM histidine, or from 20 mM to 30 mM histidine.

[0264] In some embodiments, the pharmaceutical formulation comprises about 25 mM histidine.

[0265] In some embodiments, the pharmaceutical formulation comprises from 30 mM to 100 mM NaCl, from 30 mM to 90 mM NaCl, from 40 mM to 80 mM NaCl, from 30 mM to 70 mM histidine, or from 45 mM to 70 mM NaCl.

[0266] In some embodiments, the pharmaceutical formulation comprises about 60 mM NaCl.

[0267] T In some embodiments, the pharmaceutical formulation comprises from 20 mM to 140 mM L-arginine, from 30 mM to 140 mM L-arginine, from 40 mM to 130 mM L-arginine, from 50 mM to 120 mM L-arginine, from 60 mM to 110 mM L-arginine, from 70 mM to 110 mM L-arginine, from 80 mM to 110 mM L-arginine, or from 90 mM to 110 mM L-arginine.

[0268] In some embodiments, the pharmaceutical formulation comprises about 100 mM L-arginine.

[0269] In some embodiments, the pharmaceutical formulation comprises from 0.006% to 0.1% w/v polysorbate 80, from 0.007% to 0.09% w/v polysorbate 80, from 0.008% to 0.08% w/v polysorbate 80, from 0.009% to 0.09% w/v polysorbate 80, from 0.01% to 0.08% w/v polysorbate 80, from 0.01% to 0.07% w/v polysorbate 80, from 0.01% to 0.07% w/v polysorbate 80, or from 0.01% to 0.06% w/v polysorbate 80, or from 0.009% to 0.05% w/v polysorbate 80.

[0270] In some embodiments, the pharmaceutical formulation comprises about 0.01% polysorbate 80.

[0271] In some embodiments, the pH is from 6 to 7.0.

[0272] In some embodiments, the pH is from 6.3 to 6.8.

[0273] In some embodiments, the pH is 6.5+/−0.2.

[0274] In some embodiments, the anti-PVRIG antibody is at a concentration of from 10 mg/mL to 40 mg/mL, 15 mg/mL to 40 mg/mL, 15 mg/mL to 30 mg/mL, 10 mg/mL to 25 mg/mL, or 15 mg/mL to 25 mg/mL.

[0275] In some embodiments, the anti-PVRIG antibody is at a concentration of about 20 mg/mL.

[0276] In some embodiments, the anti-PVRIG antibody formulation comprises:
[0277] a) a heavy chain comprising:
   [0278] i) a VH-CH1-hinge-CH2-CH3, wherein the VH is from CHA.7.518.1.H4(S241P) (SEQ ID NO:4) and wherein the CH1-hinge-CH2-CH3 region is from IgG4; and
[0279] b) a light chain comprising:
   [0280] i) a VL-CL, wherein the VL from CHA.7.518.1.H4(S241P) (SEQ ID NO:9) and wherein the CL region is from human kappa 2 light chain.

[0281] In some embodiments, the hinge region optionally comprises mutations.

[0282] In some embodiments, the hinge region optionally comprises mutations.

[0283] In some embodiments, the anti-PVRIG antibody formulation comprises:
[0284] i) a heavy chain comprising the heavy chain from CHA.7.518.1.H4(S241P) (SEQ ID NO:8); and
[0285] ii) a light chain comprising the light chain from CHA.7.518.1.H4(S241P) (SEQ ID NO:13).

[0286] In some embodiments, the anti-PVRIG antibody formulation comprising:
[0287] (a) an anti-PVRIG antibody, wherein the anti-PVRIG antibody comprises:
   [0288] i) a heavy chain variable domain comprising the vhCDR1, vhCDR2, and vhCDR3 from the heavy chain of CHA.7.518.1.H4(S241P) (SEQ ID NO:8), and
   [0289] ii) a light chain variable domain comprising the vlCDR1, vlCDR2, and vlCDR3 from the light chain of CHA.7.518.1.H4(S241P) (SEQ ID NO:13);
[0290] (b) about 25 mM histidine;
[0291] (c) about 60 mM NaCl;
[0292] (d) about 100 mM L-Arginine; and
[0293] (e) about 0.01% % w/v polysorbate 80,
[0294] wherein the composition has a pH from 6.5+/−0.2.

[0295] In some embodiments, the anti-PVRIG antibody formulation comprising:
[0296] (a) an anti-PVRIG antibody, wherein the anti-PVRIG antibody comprises:
   [0297] i) a heavy chain comprising the heavy chain from CHA.7.518.1.H4(S241P) (SEQ ID NO:8); and
   [0298] ii) a light chain comprising the light chain from CHA.7.518.1.H4(S241P) (SEQ ID NO:13);
[0299] (b) about 25 mM histidine;
[0300] (c) about 60 mM NaCl;
[0301] (d) about 100 mM L-Arginine; and
[0302] (e) about 0.01% % w/v polysorbate 80,
   wherein the composition has a pH from 6.5+/−0.2.

[0303] In some embodiments, the anti-PVRIG treatment antibody is administered at a dosage of about 0.01 mg/kg to about 20 mg/kg of the anti-PVRIG antibody or about 0.01 mg/kg to about 10 mg/kg of the anti-PVRIG antibody.

[0304] In some embodiments, the anti-PVRIG treatment antibody is administered at a dosage of about 0.01 mg/kg, 0.03 mg/kg, 0.1 mg/kg, 0.3 mg/kg, 1 mg/kg, 3 mg/kg, 10 mg/kg, or 20 mg/kg of the anti-PVRIG antibody.

[0305] In some embodiments, the anti-PVRIG treatment antibody is administered 20 mg/kg every 4 weeks.

[0306] In some embodiments, the cancer is selected from the group consisting of prostate cancer, liver cancer (HCC), colorectal cancer (CRC), colorectal cancer MSS (MSS-CRC; including refractory MSS colorectal), CRC (MSS unknown), ovarian cancer (including ovarian carcinoma), endometrial cancer (including endometrial carcinoma), breast cancer, pancreatic cancer, stomach cancer, cervical cancer, head and neck cancer, thyroid cancer, testis cancer, urothelial cancer, lung cancer, melanoma, non-melanoma skin cancer (squamous and basal cell carcinoma), glioma, renal cell cancer (RCC), renal cell carcinoma (RCC), lymphoma (non-Hodgkins' lymphoma (NHL) and Hodgkin's lymphoma (HD)), Acute myeloid leukemia (AML), T cell Acute Lymphoblastic Leukemia (T-ALL), Diffuse Large B cell lymphoma, testicular germ cell tumors, mesothelioma, esophageal cancer, triple negative breast cancer, Merkel Cells cancer, MSI-high cancer, KRAS mutant tumors, adult T-cell leukemia/lymphoma, pleural mesothelioma, anal SCC, neuroendocrine lung cancer (including neuroendocrine lung carcinoma), NSCLC, NSCL (large cell), NSCLC large cell, NSCLC squamous cell, cervical SCC, malignant melanoma, pancreatic cancer, pancreatic adenocarcinoma, adenoid cystic cancer (including adenoid cystic carcinoma), primary peritoneal cancer, microsatellite stable primary peritoneal cancer, platinum resistant microsatellite stable primary peritoneal cancer, Myelodysplastic syndromes (MDS), HNSCC, PD1 refractory or relapsing cancer, gastroesophageal junction cancer, gastric cancer, and/or fallopian tube cancer.

[0307] In some embodiments, the anti-PVRIG antibody is administered in combination with an anti-PD-1 antibody.

[0308] In some embodiments, the anti-PVRIG antibody is administered in combination with an anti-PD-L1 antibody.

[0309] In some embodiments, the anti-PVRIG antibody is administered in combination with an anti-TIGIT antibody.

[0310] In some embodiments, the anti-PVRIG antibody is administered in combination with an anti-PD-1 antibody and an anti-TIGIT antibody.

[0311] In some embodiments, the anti-PVRIG antibody is administered in combination with an anti-PD-L1 antibody and an anti-TIGIT antibody.

[0312] In some embodiments, the anti-PD1 antibody is selected from the group consisting of nivolumab and pembrolizumab.

[0313] In some embodiments, the anti-PD-L1 antibody is selected from the group consisting of atezolizumab, avelumab, durvalumab, KN035(Envafolimab), and CK-301 (Cosibelimab).

[0314] In some embodiments, the anti-TIGIT antibody comprises the vhCDR1, vhCDR2, vhCDR3, vlCDR1, vlCDR2, and vlCDR3 sequences from an antibody selected from the group consisting of CPA.9.083.H4(S241P), CPA.9.086.H4(S241P), CPA.9.018, CPA.9.027, CPA.9.049, CPA.9.057, CPA.9.059, CPA.9.083, CPA.9.086, CPA.9.089, CPA.9.093, CPA.9.101, CPA.9.103, CHA.9.536.3.1, CHA.9.536.3, CHA.9.536.4, CHA.9.536.5, CHA.9.536.7, CHA.9.536.8, CHA.9.560.1, CHA.9.560.3, CHA.9.560.4, CHA.9.560.5, CHA.9.560.6, CHA.9.560.7, CHA.9.560.8, CHA.9.546.1, CHA.9.547.1, CHA.9.547.2, CHA.9.547.3, CHA.9.547.4, CHA.9.547.6, CHA.9.547.7, CHA.9.547.8, CHA.9.547.9, CHA.9.547.13, CHA.9.541.1, CHA.9.541.3, CHA.9.541.4, CHA.9.541.5, CHA.9.541.6, CHA.9.541.7, and CHA.9.541.8.

[0315] In some embodiments, the anti-TIGIT antibody comprises the variable heavy domain and the variable light domain sequences from an antibody selected from the group consisting of CPA.9.083.H4(S241P), CPA.9.086.H4(S241P), CPA.9.018, CPA.9.027, CPA.9.049, CPA.9.057, CPA.9.059, CPA.9.083, CPA.9.086, CPA.9.089, CPA.9.093, CPA.9.101, CPA.9.103, CHA.9.536.3.1, CHA.9.536.3, CHA.9.536.4, CHA.9.536.5, CHA.9.536.7, CHA.9.536.8, CHA.9.560.1, CHA.9.560.3, CHA.9.560.4, CHA.9.560.5, CHA.9.560.6, CHA.9.560.7, CHA.9.560.8, CHA.9.546.1, CHA.9.547.1, CHA.9.547.2, CHA.9.547.3, CHA.9.547.4, CHA.9.547.6, CHA.9.547.7, CHA.9.547.8, CHA.9.547.9, CHA.9.547.13, CHA.9.541.1, CHA.9.541.3, CHA.9.541.4, CHA.9.541.5, CHA.9.541.6, CHA.9.541.7, and CHA.9.541.8.

[0316] In some embodiments, the anti-TIGIT antibody is selected from the group consisting of CPA.9.083.H4(S241P) and CPA.9.086.H4(S241P).

[0317] In some embodiments, the anti-TIGIT antibody comprises:
[0318] a) a heavy chain comprising VH-CH1-hinge-CH2-CH3; and
[0319] b) a light chain comprising VL-VC, wherein VC is either kappa or lambda.

[0320] In some embodiments, the sequence of the CH1-hinge-CH2-CH3 is selected from human IgG1, IgG2 and IgG4, and variants thereof.

[0321] In some embodiments, the anti-PVRIG antibody is CHA.7.518.1.H4(S241P), the anti-TIGIT antibody is CPA.9.086.H4(S241P) and the anti-PD-1 antibody is nivolumab.

[0322] In some embodiments, the anti-PVRIG antibody is CHA.7.518.1.H4(S241P), the anti-TIGIT antibody is CPA.9.083.H4(S241P) and the anti-PD-1 antibody is nivolumab.

[0323] In some embodiments, the anti-PVRIG antibody is CHA.7.518.1.H4(S241P), the anti-TIGIT antibody is CPA.9.086.H4(S241P) and the anti-PD-1 antibody is pembrolizumab.

[0324] In some embodiments, the anti-PVRIG antibody is CHA.7.518.1.H4(S241P), the anti-TIGIT antibody is CPA.9.083.H4(S241P) and the anti-PD-1 antibody is pembrolizumab.

[0325] In some embodiments, the anti-PVRIG antibody is CHA.7.538.1.2.H4(S241P), the anti-TIGIT antibody is CPA.9.086.H4(S241P) and the anti-PD-1 antibody is nivolumab.

[0326] In some embodiments, the anti-PVRIG antibody is CHA.7.538.1.2.H4(S241P), the anti-TIGIT antibody is CPA.9.083.H4(S241P) and the anti-PD-1 antibody is nivolumab.

[0327] In some embodiments, the anti-PVRIG antibody is CHA.7.538.1.2.H4(S241P), the anti-TIGIT antibody is CPA.9.086.H4(S241P) and the anti-PD-1 antibody is pembrolizumab.

[0328] In some embodiments, the anti-PVRIG antibody is CHA.7.538.1.2.H4(S241P), the anti-TIGIT antibody is CPA.9.083.H4(S241P) and the anti-PD-1 antibody is pembrolizumab.

[0329] In some embodiments, the anti-PVRIG antibody is CHA.7.518.1.H4(S241P), the anti-TIGIT antibody is CPA.9.086.H4(S241P) and the anti-PD-L1 antibody is selected from the group consisting of atezolizumab, avelumab, durvalumab, KN035(Envafolimab), and CK-301 (Cosibelimab).

[0330] In some embodiments, the anti-PVRIG antibody is CHA.7.518.1.H4(S241P), the anti-TIGIT antibody is CPA.9.083.H4(S241P) and the anti-PD-L1 antibody is selected from the group consisting of atezolizumab, avelumab, durvalumab, KN035(Envafolimab), and CK-301 (Cosibelimab).

[0331] In some embodiments, the anti-PVRIG antibody is CHA.7.538.1.2.H4(S241P), the anti-TIGIT antibody is CPA.9.086.H4(S241P) and the anti-PD-L1 antibody is selected from the group consisting of atezolizumab, avelumab, durvalumab, KN035(Envafolimab), and CK-301 (Cosibelimab).

[0332] In some embodiments, the anti-PVRIG antibody is CHA.7.538.1.2.H4(S241P), the anti-TIGIT antibody is CPA.9.083.H4(S241P) and the anti-PD-L1 antibody is selected from the group consisting of atezolizumab, avelumab, durvalumab, KN035(Envafolimab), and CK-301 (Cosibelimab).

[0333] In some embodiments, the activated DC cells, DC1, and/or DC2 disclosed herein express CXCL10.

[0334] In some embodiments, the early memory CD8 T cells disclosed herein include CD8 T cells expressing CXCR3.

### BRIEF DESCRIPTION OF THE DRAWINGS

[0335] FIG. 1 depicts the full-length sequence of human PVRIG.

[0336] FIG. 2 depicts the sequence of the human Poliovirus receptor-related 2 protein (PVLR2, also known as nectin-2, CD112 or herpesvirus entry mediator B, (HVEB)), the binding partner of PVRIG. PVLR2 is a human plasma membrane glycoprotein.

[0337] FIG. 3A-3AG depicts the variable heavy and light chains as well as the vhCDR1, vhCDR2, vhCDR3, vlCDR1, vlCDR2 and vlCDR3 sequences of the PVRIG antibodies of the invention, including CHA.7.518.1.H4(S241P).

[0338] FIGS. 4A-4AA shows the amino acid sequences of the variable heavy and light domains, the full length heavy and light chains, and the variable heavy and variable light CDRs for the enumerated human CPA anti-PVRIG sequences of the invention that both bind PVRIG and block binding of PVRIG and PVLR2.

[0339] FIGS. 5A-5H depicts the amino acid sequences of the variable heavy and light domains, the full length heavy and light chains, and the variable heavy and variable light CDRs for eight human CPA anti-PVRIG sequences of the invention that bind PVRIG and but do not block binding of PVRIG and PVLR2.

[0340] FIGS. 6A-6D depicts the sequences of other PVRIG antibodies that can be formulated according to stable liquid formulations of an anti-PVRIG antibody of the present invention and can be used as anti-PVRIG treatment antibodies.

[0341] FIG. 7 depicts the sequences of human IgG1, IgG2, IgG3 and IgG4.

[0342] FIG. 8. Image of immunohistochemistry staining of tumor samples using PVRL2 antibody.

[0343] FIG. 9. Expression of +/− markers in CD8+ T cells in NSCLC patient sample.

[0344] FIG. 10. Expression of inhibitory receptors in CD8+ T cells in NSCLC patient sample.

[0345] FIG. 11. Frequencies of TSCM in CD8+ T cells in lymph node and tumors.

[0346] FIG. 12. Frequencies of CD8+ T cell in responders and non-responders to pre-treatment.

[0347] FIG. 13. Expression profiles of PVRIG among CD8+ T cells in tumors.

[0348] FIG. 14A-14C. Expression of scRNAs of PVR, PVRL2, and PD-L1 in subpopulations of dendritic cells.

[0349] FIG. 15. Microscopy characterization of PVR- and PVRL2-expressing cells in human lymph nodes.

[0350] FIG. 16. Expression level of PVR and PVRL2 in dendritic cells by disease.

[0351] FIG. 17. Percentage of altered samples for PVRL2 and with altered mutations and GISTIC2 by disease.

[0352] FIG. 18. Frequencies of altered samples for PVRL2 (DNA-sequence mutation and GISTIC2 calls) by cancer types.

[0353] FIG. 19. Putative copy-number alterations for PVRL2 from GISTIC2.

[0354] FIG. 20A-20B. A) IFNγ secretion of MEL624 parental tumor cells and MEL624 cells stably transduced with a human PVRL2 (MEL624 PVRL2 OE). MEL624 PVRL2 OE tumor cells were treated with CHA.7.518.1.H4(S241P) anti-PVRIG antibody. B) PVRL2 expression in MEL624 tumor cells and MEL624 PVRL2 OE tumor cells.

[0355] FIG. 21A-21B. CHO-S OKT3 assay. A) The effect of CHA.7.518.1.H4(S241P), a non-blocking control antibody, and anti-DNAM-1 on CD4+ T cells from a healthy donor activated by CHO-S OKT3 cells or CHO-S OKT3 hPVRL2 cells is shown. The dashed line indicates the percentage of CFSE10 CD4+ T cells after treatment with either the human IgG4 or the mouse IgG1 isotype antibodies. Each dot represents a technical replicate, average plus standard deviation is shown, data are representative of at least 2 batches of tests. B) shows IFN-γ production by three different human CD8+ T cell donors (Donors 231, 232, and 234) when co-cultured with the CHO-S OKT3 hPVRL2 cells and the indicated antibody.

[0356] FIG. 22 Expression of PVRL2 and OKT3 in CD4+ T cells.

[0357] FIG. 23. AB-635 PVRIG (6D8-1 clone) antibody sequences.

[0358] FIG. 24A-24B. Expression of PVRIG in ovarian and CRC cancers. A. expression of PVRIG in CD8+ T cells, in Tscm defined by TIM3⁻CXCR5⁺ or TIM3-PD1⁺CD28⁺ and CD4⁺ T cells. B. matched comparison of PVRIG expression between the colorectal (CRC) tumor sample and a matched normal adjacent tissue (NAT), in Tscm defined by TIM3⁻CXCR5⁺ or TIM3-PD1⁺CD28⁺ and CD4⁺ T cells.

[0359] FIGS. 25A-25I depicts a collation of the humanized sequences of five CHA antibodies.

[0360] FIGS. 26A-26E depicts a collation of the humanized sequences of five CHA antibodies.

[0361] FIG. 27 depicts schemes for combining the humanized VH and VL CHA antibodies of FIGS. 25A-25I and FIGS. 26A-26E. The “chimVH” and “chimVL” are the mouse variable heavy and light sequences attached to a human IgG constant domain.

[0362] FIG. 28A-28E depict four humanized sequences for each of CHA.7.518, CHA.7.524, CHA.7.530, CHA.7.538_1 and CHA.7.538_2. All humanized antibodies comprise the H4(S241P) substitution. Note that the light chain for CHA.7.538_2 is the same as for CHA.7.538_1. The “H1” of each is a “CDR swap” with no changes to the human framework. Subsequent sequences alter framework changes shown in larger bold font. CDR sequences are noted in bold. CDR definitions are AbM from website www.bioinf.org.uk/abs/. Human germline and joining sequences from IMGT® the international ImMunoGeneTics® information system www.imgt.org (founder and director: Marie-Paule Lefranc, Montpellier, France). Residue numbering shown as sequential (seq) or according to Chothia from website www.bioinforg.uk/abs/(AbM). “b” notes buried sidechain; “p” notes partially buried; “i” notes sidechain at interface between VH and VL domains. Sequence differences between human and murine germlines noted by asterisk (*). Potential additional mutations in frameworks are noted below sequence. Potential changes in CDR sequences noted below each CDR sequence as noted on the figure (#deamidation substitutions: Q/S/A; these may prevent asparagine (N) deamidation. @ tryptophan oxidation substitutions: Y/F/H; these may prevent tryptophan oxidation; @ methionine oxidation substitutions: L/F/A).

[0363] FIG. 29A to 29C depicts a collation of the humanized sequences of three CHA antibodies: CHA.7.518, CHA.7.538.1, and CHA.7.538.2.

[0364] FIG. 30A-30AX depict the sequences of anti-TIGIT antibodies. Unless otherwise noted, the CDRs utilize the IMGT numbering (including the antibodies of the sequence listing.

[0365] FIG. 31 diagram showing genes that are markers for particular CD8 cell types:
[0366] Naïve: TCF7, CCR7, IL7R, LEF1, SELL, LTB
[0367] Exhausted: TIM3, ENTPD1, LAYN, CD38, LAG3, VCAM1, TOX
[0368] Transitional Memory (early memory): GZMK, SH2D1A, EOMES, DTHD1, SLAMF7, FCRL3, CD28
[0369] Tissue resident Memory: XCL1, XCL2, ITGAE, ITGA1, ZNF683, CXCR6
[0370] Circulating memory: NR4A1, NR4A2, NR4A3, KLF2
[0371] Cytotoxic: FCGR3A, FGFBP2, CX3CR1, KLRG1, LILRB1
[0372] Cycling: TOP2A, MKI67

[0373] FIG. 32 diagram showing genes that are markers for particular CD8 cell types:
[0374] Naïve: TCF7, CCR7, IL7R, LEF1, SELL, LTB
[0375] Exhausted: TIM3, ENTPD1, LAYN, CD38, LAG3, VCAM1, TOX
[0376] Transitional Memory (early memory): GZMK, SH2D1A, EOMES, DTHD1, SLAMF7, FCRL3, CD28
[0377] Tissue resident Memory: XCL1, XCL2, ITGAE, ITGA1, ZNF683, CXCR6
[0378] Circulating memory: NR4A1, NR4A2, NR4A3, KLF2
[0379] Cytotoxic: FCGR3A, FGFBP2, CX3CR1, KLRG1, LILRB1
[0380] Cycling: TOP2A, MKI67

[0381] FIG. 33 diagram showing genes that are markers for particular CD8 cell types:
[0382] Naïve: TCF7, CCR7, IL7R, LEF1, SELL, LTB
[0383] Exhausted: TIM3, ENTPD1, LAYN, CD38, LAG3, VCAM1, TOX
[0384] Transitional Memory (early memory): GZMK, SH2D1A, EOMES, DTHD1, SLAMF7, FCRL3, CD28
[0385] Tissue resident Memory: XCL1, XCL2, ITGAE, ITGA1, ZNF683, CXCR6
[0386] Circulating memory: NR4A1, NR4A2, NR4A3, KLF2
[0387] Cytotoxic: FCGR3A, FGFBP2, CX3CR1, KLRG1, LILRB1
[0388] Cycling: TOP2A, MKI67

[0389] FIG. 34 diagram showing genes that are markers for particular CD8 cell types:
[0390] Naïve: TCF7, CCR7, IL7R, LEF1, SELL, LTB
[0391] Exhausted: TIM3, ENTPD1, LAYN, CD38, LAG3, VCAM1, TOX
[0392] Transitional Memory (early memory): GZMK, SH2D1A, EOMES, DTHD1, SLAMF7, FCRL3, CD28
[0393] Tissue resident Memory: XCL1, XCL2, ITGAE, ITGA1, ZNF683, CXCR6
[0394] Circulating memory: NR4A1, NR4A2, NR4A3, KLF2
[0395] Cytotoxic: FCGR3A, FGFBP2, CX3CR1, KLRG1, LILRB1
[0396] Cycling: TOP2A, MKI67

[0397] FIG. 35 diagram showing genes that are markers for particular CD8 cell types:
[0398] Naïve: TCF7, CCR7, TL7R, LEF1, SELL, LTB
[0399] Exhausted: TIM3, ENTPD1, LAYN, CD38, LAG3, VCAM1, TOX
[0400] Transitional Memory (early memory): GZMK, SH2D1A, EOMES, DTHD1, SLAMF7, FCRL3, CD28
[0401] Tissue resident Memory: XCL1, XCL2, ITGAE, ITGA1, ZNF683, CXCR6
[0402] Circulating memory: NR4A1, NR4A2, NR4A3, KLF2
[0403] Cytotoxic: FCGR3A, FGFBP2, CX3CR1, KLRG1, LILRB1
[0404] Cycling: TOP2A, MKI67

[0405] FIG. 36 diagram showing genes that are markers for particular CD8 cell types:
[0406] Naïve: TCF7, CCR7, IL7R, LEF1, SELL, LTB
[0407] Exhausted: TIM3, ENTPD1, LAYN, CD38, LAG3, VCAM1, TOX
[0408] Transitional Memory (early memory): GZMK, SH2D1A, EOMES, DTHD1, SLAMF7, FCRL3, CD28
[0409] Tissue resident Memory: XCL1, XCL2, ITGAE, ITGA1, ZNF683, CXCR6
[0410] Circulating memory: NR4A1, NR4A2, NR4A3, KLF2
[0411] Cytotoxic: FCGR3A, FGFBP2, CX3CR1, KLRG1, LILRB1
[0412] Cycling: TOP2A, MKI67

[0413] FIG. 37 diagram showing genes that are markers for particular CD8 cell types:
[0414] Naïve: TCF7, CCR7, IL7R, LEF1, SELL, LTB
[0415] Exhausted: TIM3, ENTPD1, LAYN, CD38, LAG3, VCAM1, TOX
[0416] Transitional Memory (early memory): GZMK, SH2D1A, EOMES, DTHD1, SLAMF7, FCRL3, CD28
[0417] Tissue resident Memory: XCL1, XCL2, ITGAE, ITGA1, ZNF683, CXCR6
[0418] Circulating memory: NR4A1, NR4A2, NR4A3, KLF2
[0419] Cytotoxic: FCGR3A, FGFBP2, CX3CR1, KLRG1, LILRB1
[0420] Cycling: TOP2A, MKI67

[0421] FIG. 38 shows unsupervised correlation analysis of 13 data sets.

[0422] FIG. 39 provides data sets analyzed in FIG. 38.

[0423] FIG. 40 shows Cosine similarity analysis and calculation heat map.

[0424] FIG. 41: PVRIG Knockout or Inhibition Reduces Tumor Growth. Combination data shown with PD-L1 or TIGIT in mouse models.

[0425] FIG. 42: PVRIG is Expressed by T Stem-like Cells. Left panel shows scRNA analysis of Gau et al., Nat Med. (2018). Right panel shows flow cytometry data. Potential for optimal TSCM activation, expansion, and generation of effector T cells.

[0426] FIG. 43: PVRIG uniquely clusters with early memory differentiation/stem-like genes: PCA analysis of CD8+ T cell genes—NSCLC.

[0427] FIG. 44: PVRIG uniquely clusters with early memory differentiation/stem-like genes: unsupervised correlation analysis of scRNA—CRC.

[0428] FIG. 45A-FIG. 45C: PVRL2 has dominant expression on dendritic cells. CHA.7.518.1.H4(S241P) may enhance interaction and priming of T_{SCM} by DCs in PD-L1^{low} non-inflamed indications.

[0429] FIG. 46: PVRL2 and PVRIG expression in tertiary lymphoid structures (tertiary lymphoid structures are lymphoid structures in the tumor bed in which local T cell priming occur), which is predictive of PD1 response. Supports the potential of CHA.7.518.1.H4(S241P) to enhance T cell proliferation at the tumor bed.

[0430] FIG. 47 provides a schematic of the clinical study design. CHA.7.518.1.H4(S241P), which is the first PVRIG blocker tested clinically.

[0431] FIG. 48 provides data related to confirmed partial response (PR) in patient with primary peritoneal PD-L1 negative cancer treated with CHA.7.518.1.H4(S241P) monotherapy. PR in patient with non-inflamed TME demonstrating immune activation in peripheral blood following CHA.7.518.1.H4(S241P) monotherapy.

[0432] FIG. 49A-FIG. 49B: PVRIG clusters with early differentiation/memory genes, unlike other immune checkpoints that cluster with exhausted genes, in CD8+ T cells.

[0433] FIG. 50: PVRIG is expressed by early memory CD8+ T cells in multiple cancer indications.

[0434] FIG. 51: PVRL2 is dominantly expressed on dendritic cells.

[0435] FIG. 52: PVRL2 is expressed in Tertiary Lymphoid Structures in the tumor bed. TLSs were identified in subsets of samples across all tumors tested (NSCLC, CRC primary and metastasis, ovarian cancer, endometrial cancer, breast primary TNBC and breast metastasis) and for most cases TLSs were positive for PVRL2. Tertiary lymphoid structures are Lymphoid Structures in the tumor bed in which local T cell activation occur. In addition to tumor cells and endothelial cells, PVRL2 is also expressed on TLSs and immune aggregates formed in tumors (arrows). Staining was performed using a proprietary rabbit mAb raised against the ECD of PVRL2, staining was performed on a Dako Autostainer. Moreover, immunohistochemistry analysis across multiple tumor types, identified PVRL2 expression in Tertiary Lymphoid Structures, local structures in the TME in which in-situ T cell priming occurs. This further support PVRIG-PVRL2 interaction as a potential dominant interaction important for T cell activation in TME.

[0436] FIG. 53: PVRIG is Expressed by Stem-like and Exhausted CD8+ T Cells in the TME. PVRIG is expressed by both stem-like (TIM3⁻CD28⁺PD-1⁺) and exhausted (TIM3⁺CD28⁻PD-1⁺) CD8+ T cells. When looking at PVRIG expression by flow cytometry in various cancer samples, PVRIG, as previously described for TIGIT and PD-1 is expressed on both stem-cell-memory and exhausted CD8 T cells. Indicated cancer samples (n=16) were dissociated to single cell suspensions and analyzed for PVRIG expression by flow-cytometry. PVRIG is expressed by both stem-like (TIM3⁻CD28⁺PD-1⁺) and exhausted (TIM3⁺CD28⁻PD-1⁺) CD8⁺ T cells B.

[0437] FIG. 54A-FIG. 54B (version 1): PVRIG Uniquely Clusters with Markers of Early Memory

[0438] (Stem-like) CD8+ T Cells. By performing unsupervised principal component analysis on scRNA expression matrix of CD8+ T cells across multiple tumor types, we discovered PVRIG unique expression pattern: while TIGIT is strongly correlated with PD-1, CTLA-4, and other markers of exhausted T-cells, PVRIG uniquely clusters with markers of early memory T-cells, indicating that PVRIG has more dominant expression on these early differentiated cells, which have higher proliferative potential. Additional un-supervised clustering approach yielded similar results as shown in the matrix on the right side.

[0439] FIG. 54A-FIG. 54B (version 2): A. Unsupervised PCA was performed on scRNA expression matrix of TME CD8+ T cells, which includes all variable genes. Using cells as features and genes as entries, co-expression pattern among genes known to be expressed on naïve, memory, and exhausted CD8+ T cells is shown. Nine publicly available datasets were analyzed, representative NSCLC data set is shown. B. Publicly available scRNA-seq datasets (CRC, NSCLC, HNSCC, Melanoma, Liver cancer, n=13) were analyzed for co-expression pattern among 19 genes, including genes known to be expressed on naïve (TCF7, TL7R, SELL), memory (GZMK, EOMES), and exhausted (PDCD1, LAG3, HAVCR2) CD8+ T cells. Representative dataset of CRC is presented.

[0440] FIG. 55: PVRIG Shows Significantly Higher Expression on Early Memory (CD28+) CD8+ T cells Differentiating it from TIGIT and PD-1. CRC, stomach, ovarian, endometrial and bladder cancer (n=13). Accordingly, PVRIG is shown to have a significantly higher expression on early memory (CD28+) CD8+ T cells, in contrast to TIGIT and PD-1. Samples of CRC, stomach, ovarian, endometrial and bladder cancer (n=13) were dissociated to single cell suspensions and analyzed for protein expression by flow-cytometry. Paired t-test was used to compare between PVRIG, TIGIT and PD-1 expression among cell populations. PVRIG is shown to have significant higher expression on early memory (CD28⁺) T cells, in contrast to TIGIT and PD-1 which have comparable expression on CD28⁺ and CD28⁻ T cells.

[0441] FIG. 56A-56C: A)/B) PVRL2 is Dominantly Expressed on Dendritic Cells. When looking at PVRL2, the ligand of PVRIG, RNA expression in multiple datasets, reveals that PVRL2 is more abundantly expressed across DC subtypes compared to PD-L1 and PVR (ligand of TIGIT). A representative NSCLC sample on right, shows the dominant PVRL2 expression on DC1, DC2 and activated DCs. C) PVRL2 Protein is Expressed across Dendritic Cell Sub-Types (Representative ovarian sample shown). Flow cytometry analysis validated RNA results, confirming PVRL2 protein expression across tumor types. A representative plot of ovarian tumor shows dominant PVRL2 expression on DC subtypes.

[0442] FIG. 57A-57C: A) Dot plots showing the percent of cells and average level of expression of PVR/PVRL2/PD-L1 in major dendritic cell subsets across multiple publicly available scRNA-seq cancer datasets. B) Representative tSNE map depicting the expression profile of PVR/PVRL2/PD-L1 in major dendritic cell subsets in NSCLC. C) PVRL2 protein expression across DC subsets in a representative ovarian cancer sample analyzed by flow-cytometry.

[0443] FIG. 58 provides PVRL2 expression from multiple scRNA data sets: tumor, healthy, and inflamed.

[0444] FIG. 59A-FIG. 59B provides PVRL2 is overexpressed by endothelial cells and/or enterocytes in healthy and/or inflamed gastrointestinal (GI) tracts.

[0445] FIG. 60A-FIG. 60C: Technology. FIG. A) Illustration of the MERFISH technology, using sequential FISH reactions each transcript is detected by series of binary barcodes which are later translated into distinct m RNA transcripts. Transcripts are then quantified per cell as detected by cell-border stain to obtain single-cell expression matrix and spatial localization map. FIG. B) Image showing cell boundary stain in CRC tumor (eft) and the overlayed boundaries as detected algorithmically (gray line in the middle image individual mRNA. transcripts appear as colored dots. Example of individual cell and its associated transcripts (bottom left). FIG. C) (left) UMAP showing the clustering of cells based on the extracted single-cell data and later projected back ono the spatial localization (right). M1—inflamatory macrophages. M2—anti-inflamatory macrophages.

[0446] FIG. 61A-FIG. 61B: Spatial mRNA correlation provides means to study gene association. FIG. A) images showing the spatial distribution in-situ of selected mRNA probes, representing different lineages, in Ovarian tumor sample. Bottom panel shows enlarged region of the overlayed image. Scale bar 1 mm. FIG. B) Spatial correlation of selected genes representing different lineages based on Pearson correlation in window size of 105 mm. It is observed that genes specific to different cell type spatially co-localize and thus cluster together.

[0447] FIG. 62A-FIG. 62D: Profiling cellular neighborhood at the single cell level. FIG. A) Schematic of cellular neighborhood profiling methodology. FIG. B) Enrichment of cell populations next to activated DCs vs random sampling. FIG. C) Average number of CXCR3+ T-cell within the neighborhood of activated DCs, comparing random sampling to observed distribution. P-value 2.95E-32, T-Test. FIG. D) Predicted cell-cell interactions between activated DCs and the listed cell populations, considering both expression levels of receptor-ligand and cell-proximity it is suggested that Activated DCs interact with neigboring CXCR3+ T-cells.

[0448] FIG. 63A-FIG. 63H: DNAM-1 axis shows dominant presence in tertiary lymphoid structures (TLS). FIG. A) DAPI pseudo-coloring of colorectal tumor section highlighting tumor, stroma and TLS regions. FIG. B) Spatial localization of single cells corresponding to (A). FIG. C) UMAP showing single-cell clustering of single cells. FIG. D) Localization of selected cell types in the TLS region showing the unique co-localization. FIG. E) Relative abundance of types of T-cells and B-cells in the three regions noted in (A). FIG. F) Fold enrichment of selected checkpoints shows preferential expression of PVRIG, TIGIT and DNAM-1 at the TLS region versus TME. FIG. G) Image showing individual PVRIG+ T-cell adjacent to LMAP3+PVRL2+DC in the TLS region FIG. H) Summarizing illustration showcasing the activity of PVRIG in the TLS regions and potential contribution of CHA.7.518.1.H4(S241P) (anti-PVRIG) treatment to activating immune response. (*Zoya Alteber, et al., SITC 2021.)

### DETAILED DESCRIPTION OF THE INVENTION

### I. Introduction

[0449] Cancer can be considered as an inability of the patient to recognize and eliminate cancerous cells. In many instances, these transformed (e.g., cancerous) cells counteract immunosurveillance. There are natural control mechanisms that limit T-cell activation in the body to prevent unrestrained T-cell activity, which can be exploited by cancerous cells to evade or suppress the immune response. Restoring the capacity of immune effector cells especially T cells—to recognize and eliminate cancer is the goal of immunotherapy. The field of immuno-oncology, sometimes referred to as “immunotherapy” is rapidly evolving, with several recent approvals of T cell checkpoint inhibitory antibodies such as Yervoy, Keytruda and Opdivo. These antibodies are generally referred to as “checkpoint inhibitors” because they block normally negative regulators of T cell immunity. It is generally understood that a variety of immunomodulatory signals, both costimulatory and coinhibitory, can be used to orchestrate an optimal antigen-specific immune response. Generally, these antibodies bind to checkpoint inhibitor proteins such as CTLA-4 and PD-1, which under normal circumstances prevent or suppress activation of cytotoxic T cells (CTLs). By inhibiting the checkpoint protein, for example through the use of antibodies that bind these proteins, an increased T cell response against tumors can be achieved. That is, these cancer checkpoint proteins suppress the immune response; when the proteins are blocked, for example using antibodies to the checkpoint protein, the immune system is activated, leading to immune stimulation, resulting in treatment of conditions such as cancer and infectious disease. PVRIG is expressed on the cell surface of NK and T-cells and shares several similarities to other known immune checkpoints. As indicated about, PVRL2 has been identified as the ligand for PVRIG.

[0450] The present invention is directed to biomarkers for use in determining populations for treatment with antibodies to human Poliovirus Receptor Related Immunoglobulin Domain Containing Protein, or “PVRIG”, sometimes also referred to herein as “PV protein” (e.g., anti-PVRIG antibodies including those with CDRs identical to those shown in FIG. 3). Such biomarkers include, for example PVRIG and/or PVRL2 expression, as described herein, as well as DNAM-1 expression. In some embodiments, the biomarker is PVRIG expression. In some embodiments, the biomarker is PVRL2 expression. In some embodiments, the biomarker is DNAM-1 expression. In some embodiments, the biomarker is PVRIG expression. In some embodiments, the biomarker is PVRL2 expression.

[0451] The present invention also provides biomarkers for use with formulations comprising anti-PVRIG antibodies, including antigen binding domains, that bind to the human PVRIG and peptides thereof and methods of activating T cells and/or NK cells to treat diseases such as cancer and infectious diseases, and other conditions where increased immune activity results in treatment. In particular, these formulations comprise antibodies comprising heavy and light chains as well as the vhCDR1, vhCDR2, vhCDR3, vlCDR1, vlCDR2 and vlCDR3 sequences from CHA.7.518.1.H4(S241P). In some embodiments, anti-PVRIG antibodies include those with CDRs identical to those shown in FIG. 3. In some embodiments, anti-PVRIG antibodies include those with CDRs identical to those shown in FIGS. 5A-5D, as well as anti-PVRIG antibodies comprising the heavy and light chains as provided in FIGS. 5A-5D.

### II. PVRIG Proteins

[0452] The present invention provides formulations comprising antibodies that specifically bind to PVRIG proteins. “Protein” in this context is used interchangeably with “polypeptide”, and includes peptides as well. The present invention provides antibodies that specifically bind to PVRIG proteins. PVRIG is a transmembrane domain protein of 326 amino acids in length, with a signal peptide (spanning from amino acid 1 to 40), an extracellular domain (spanning from amino acid 41 to 171), a transmembrane domain (spanning from amino acid 172 to 190) and a cytoplasmic domain (spanning from amino acid 191 to 326). The full length human PVRIG protein is shown in FIG. 1. There are two methionines that can be start codons, but the mature proteins are identical.

[0453] Accordingly, as used herein, the term “PVRIG” or “PVRIG protein” or “PVRIG polypeptide” may optionally include any such protein, or variants, conjugates, or fragments thereof, including but not limited to known or wild type PVRIG, as described herein, as well as any naturally occurring splice variants, amino acid variants or isoforms, and in particular the ECD fragment of PVRIG. The term “soluble” form of PVRIG is also used interchangeably with the terms “soluble ectodomain (ECD)” or “ectodomain” or “extracellular domain (ECD) as well as “fragments of PVRIG polypeptides”, which may refer broadly to one or more of the following optional polypeptides:

[0454] The PVRIG proteins contain an immunoglobulin (Ig) domain within the extracellular domain, which is a PVR-like Ig fold domain. The PVR-like Ig fold domain may be responsible for functional counterpart binding, by analogy to the other B7 family members. The PVR-like Ig fold domain of the extracellular domain includes one disulfide bond formed between intra domain cysteine residues, as is typical for this fold and may be important for structure-function. These cysteines are located at residues 22 and 93 (or 94). In one embodiment, there is provided a soluble fragment of PVRIG that can be used in testing of PVRIG antibodies. Included within the definition of PVRIG proteins are PVRIG ECD fragments, including know ECD fragments such as those described in U.S. Pat. No. 9,714,289, incorporate by reference herein in its entirety for all purposes.

[0455] As noted herein and more fully described below, the anti-PVRIG antibodies (including antigen-binding fragments) that both bind to PVRIG and prevent activation by PVRL2 (e.g., most commonly by blocking the interaction of PVRIG and PVLR2), are used to enhance T cell and/or NK cell activation and be used in treating diseases such as cancer and pathogen infection.

### III. Tigit Proteins

[0456] The present invention provides antibodies that specifically bind to TIGIT proteins and prevent activation by its ligand protein, PVR, poliovirus receptor (aka, CD155) a human plasma membrane glycoprotein. TIGIT, or T cell immunoreceptor with Ig and ITIM domains, is a co-inhibitory receptor protein also known as WUCAM, Vstm3 or Vsig9. TIGIT has an immunoglobulin variable domain, a transmembrane domain, and an immunoreceptor tyrosine-based inhibitory motif (ITIM) and contains signature sequence elements of the PVR protein family. The extracellular domain (ECD) sequences of TIGIT and of PVR are shown in FIG. 1B. The antibodies of the invention are specific for the TIGIT ECD such that the binding of TIGIT and PVR is blocked

[0457] Accordingly, as used herein, the term “TIGIT” or “TIGIT protein” or “TIGIT polypeptide” may optionally include any such protein, or variants, conjugates, or fragments thereof, including but not limited to known or wild type TIGIT, as described herein, as well as any naturally occurring splice variants, amino acid variants or isoforms, and in particular the ECD fragment of TIGIT.

[0458] As noted herein and more fully described below, anti-TIGIT antibodies (including antigen-binding fragments) that both bind to TIGIT and prevent activation by PVR (e.g., most commonly by blocking the interaction of TIGIT and PVR), are used to enhance T cell and/or NK cell activation and be used in treating diseases such as cancer and pathogen infection.

### IV. Antibodies

[0459] Accordingly, the invention provides anti-PVRIG antibodies that can be formulated according to the formulations and invention described herein and which are provided in FIG. 3 (e.g., including anti-PVRIG antibodies including those with CDRs identical to those shown in FIG. 3). PVRIG, also called Poliovirus Receptor Related Immunoglobulin Domain Containing Protein, Q6DKI7 or C7orf15, relates to amino acid and nucleic acid sequences shown in RefSeq accession identifier NP_076975, shown in FIG. 1. The antibodies of the invention are specific for the PVRIG extracellular domain.

[0460] As is discussed below, the term “antibody” is used generally. Antibodies that find use in the present invention can take on a number of formats as described herein, including traditional antibodies as well as antibody derivatives, fragments and mimetics, described below. In general, the term “antibody” includes any polypeptide that includes at least one antigen binding domain, as more fully described below. Antibodies may be polyclonal, monoclonal, xenogeneic, allogeneic, syngeneic, or modified forms thereof, as described herein, with monoclonal antibodies finding particular use in many embodiments. In some embodiments, antibodies of the invention bind specifically or substantially specifically to PVRIG molecules. The terms “monoclonal antibodies” and “monoclonal antibody composition”, as used herein, refer to a population of antibody molecules that contain only one species of an antigen-binding site capable of immunoreacting with a particular epitope of an antigen, whereas the term “polyclonal antibodies” and “polyclonal antibody composition” refer to a population of antibody molecules that contain multiple species of antigen-binding sites capable of interacting with a particular antigen. A monoclonal antibody composition, typically displays a single binding affinity for a particular antigen with which it immunoreacts.

[0461] Traditional full length antibody structural units typically comprise a tetramer. Each tetramer is typically composed of two identical pairs of polypeptide chains, each pair having one “light” (typically having a molecular weight of about 25 kDa) and one “heavy” chain (typically having a molecular weight of about 50-70 kDa). Human light chains are classified as kappa and lambda light chains. The present invention is directed to the IgG class, which has several subclasses, including, but not limited to IgG1, IgG2, IgG3, and IgG4. Thus, “isotype” as used herein is meant any of the subclasses of immunoglobulins defined by the chemical and antigenic characteristics of their constant regions. While the exemplary antibodies herein designated “CPA” are based on IgG1 heavy constant regions, as shown in FIG. 7, the anti-PVRIG antibodies of the invention include those using IgG2, IgG3 and IgG4 sequences, or combinations thereof. For example, as is known in the art, different IgG isotypes have different effector functions which may or may not be desirable. Accordingly, the CPA antibodies of the invention can also swap out the IgG1 constant domains for IgG2, IgG3 or IgG4 constant domains (depicted in FIG. 7), with IgG2 and IgG4 finding particular use in a number of situations, for example for ease of manufacture or when reduced effector function is desired, the latter being desired in some situations.

[0462] The amino-terminal portion of each chain includes a variable region of about 100 to 110 or more amino acids primarily responsible for antigen recognition, generally referred to in the art and herein as the “Fv domain” or “Fv region”. In the variable region, three loops are gathered for each of the V domains of the heavy chain and light chain to form an antigen-binding site. Each of the loops is referred to as a complementarity-determining region (hereinafter referred to as a “CDR”), in which the variation in the amino acid sequence is most significant. “Variable” refers to the fact that certain segments of the variable region differ extensively in sequence among antibodies. Variability within the variable region is not evenly distributed. Instead, the V regions consist of relatively invariant stretches called framework regions (FRs) of 15-30 amino acids separated by shorter regions of extreme variability called “hypervariable regions”.

[0463] Each VH and VL is composed of three hypervariable regions (“complementary determining regions,” “CDRs”) and four FRs, arranged from amino-terminus to carboxy-terminus in the following order: FR1-CDR1-FR2-CDR2-FR3-CDR3-FR4.

[0464] The hypervariable region generally encompasses amino acid residues from about amino acid residues 24-34 (LCDR1; “L” denotes light chain), 50-56 (LCDR2) and 89-97 (LCDR3) in the light chain variable region and around about 31-35B (HCDR1; “H” denotes heavy chain), 50-65 (HCDR2), and 95-102 (HCDR3) in the heavy chain variable region, although sometimes the numbering is shifted slightly as will be appreciated by those in the art; Kabat et al., SEQUENCES OF PROTEINS OF IMMUNOLOGICAL INTEREST, 5 th Ed. Public Health Service, National Institutes of Health, Bethesda, Md. (1991) and/or those residues forming a hypervariable loop (e.g., residues 26-32 (LCDR1), 50-52 (LCDR2) and 91-96 (LCDR3) in the light chain variable region and 26-32 (HCDR1), 53-55 (HCDR2) and 96-101 (HCDR3) in the heavy chain variable region; Chothia and Lesk (1987) J. Mol. Biol. 196:901-917. Specific CDRs of the invention are described below and shown in FIG. 3.

[0465] The carboxy-terminal portion of each chain defines a constant region primarily responsible for effector function. Kabat et al. collected numerous primary sequences of the variable regions of heavy chains and light chains. Based on the degree of conservation of the sequences, they classified individual primary sequences into the CDR and the framework and made a list thereof (see SEQUENCES OF IMMUNOLOGICAL INTEREST, 5 th edition, NIH publication, No. 91-3242, E. A. Kabat et al., entirely incorporated by reference).

[0466] In the IgG subclass of immunoglobulins, there are several immunoglobulin domains in the heavy chain. By “immunoglobulin (Ig) domain” herein is meant a region of an immunoglobulin having a distinct tertiary structure. Of interest in the present invention are the heavy chain domains, including, the constant heavy (CH) domains and the hinge domains. In the context of IgG antibodies, the IgG isotypes each have three CH regions. Accordingly, “CH” domains in the context of IgG are as follows: “CH1” refers to positions 118-220 according to the EU index as in Kabat. “CH2” refers to positions 237-340 according to the EU index as in Kabat, and “CH3” refers to positions 341-447 according to the EU index as in Kabat.

[0467] Accordingly, the invention provides variable heavy domains, variable light domains, heavy constant domains, light constant domains and Fc domains to be used as outlined herein. By “variable region” as used herein is meant the region of an immunoglobulin that comprises one or more Ig domains substantially encoded by any of the Vκ or Vλ, and/or VH genes that make up the kappa, lambda, and heavy chain immunoglobulin genetic loci respectively. Accordingly, the variable heavy domain comprises vhFR1-vhCDR1-vhFR2-vhCDR2-vhFR3-vhCDR3-vhFR4, and the variable light domain comprises vlFR1-vlCDR1-vlFR2-vlCDR2-vlFR3-vlCDR3-vlFR4. By “heavy constant region” herein is meant the CH1-hinge-CH2-CH3 portion of an antibody. By “Fc” or “Fc region” or “Fc domain” as used herein is meant the polypeptide comprising the constant region of an antibody excluding the first constant region immunoglobulin domain and in some cases, part of the hinge. Thus Fc refers to the last two constant region immunoglobulin domains of IgA, IgD, and IgG, the last three constant region immunoglobulin domains of IgE and IgM, and the flexible hinge N-terminal to these domains. For IgA and IgM, Fc may include the J chain. For IgG, the Fc domain comprises immunoglobulin domains Cγ2 and Cγ3 (Cγ2 and Cγ3) and the lower hinge region between Cγ1 (Cγ1) and Cγ2 (Cγ2). Although the boundaries of the Fc region may vary, the human IgG heavy chain Fc region is usually defined to include residues C226 or P230 to its carboxyl-terminus, wherein the numbering is according to the EU index as in Kabat. In some embodiments, as is more fully described below, amino acid modifications are made to the Fc region, for example to alter binding to one or more FcγR receptors or to the FcRn receptor.

[0468] Thus, “Fc variant” or “variant Fc” as used herein is meant a protein comprising an amino acid modification in an Fc domain. The Fc variants of the present invention are defined according to the amino acid modifications that compose them. Thus, for example, N434S or 434S is an Fc variant with the substitution serine at position 434 relative to the parent Fc polypeptide, wherein the numbering is according to the EU index. Likewise, M428L/N434S defines an Fc variant with the substitutions M428L and N434S relative to the parent Fc polypeptide. The identity of the WT amino acid may be unspecified, in which case the aforementioned variant is referred to as 428L/434S. It is noted that the order in which substitutions are provided is arbitrary, that is to say that, for example, 428L/434S is the same Fc variant as M428L/N434S, and so on. For all positions discussed in the present invention that relate to antibodies, unless otherwise noted, amino acid position numbering is according to the EU index.

[0469] By “Fab” or “Fab region” as used herein is meant the polypeptide that comprises the VH, CH1, VL, and CL immunoglobulin domains. Fab may refer to this region in isolation, or this region in the context of a full length antibody, antibody fragment or Fab fusion protein. By “Fv” or “Fv fragment” or “Fv region” as used herein is meant a polypeptide that comprises the VL and VH domains of a single antibody. As will be appreciated by those in the art, these generally are made up of two chains.

[0470] Throughout the present specification, either the IMTG numbering system or the Kabat numbering system is generally used when referring to a residue in the variable domain (approximately, residues 1-107 of the light chain variable region and residues 1-113 of the heavy chain variable region) (e.g., Kabat et al., supra (1991)). EU numbering as in Kabat is generally used for constant domains and/or the Fc domains.

[0471] The CDRs contribute to the formation of the antigen-binding, or more specifically, epitope binding site of antibodies. “Epitope” refers to a determinant that interacts with a specific antigen binding site in the variable region of an antibody molecule known as a paratope. Epitopes are groupings of molecules such as amino acids or sugar side chains and usually have specific structural characteristics, as well as specific charge characteristics. A single antigen may have more than one epitope.

[0472] The epitope may comprise amino acid residues directly involved in the binding (also called immunodominant component of the epitope) and other amino acid residues, which are not directly involved in the binding, such as amino acid residues which are effectively blocked by the specifically antigen binding peptide; in other words, the amino acid residue is within the footprint of the specifically antigen binding peptide.

[0473] Epitopes may be either conformational or linear. A conformational epitope is produced by spatially juxtaposed amino acids from different segments of the linear polypeptide chain. A linear epitope is one produced by adjacent amino acid residues in a polypeptide chain. Conformational and nonconformational epitopes may be distinguished in that the binding to the former but not the latter is lost in the presence of denaturing solvents.

[0474] An epitope typically includes at least 3, and more usually, at least 5 or 8-10 amino acids in a unique spatial conformation. Antibodies that recognize the same epitope can be verified in a simple immunoassay showing the ability of one antibody to block the binding of another antibody to a target antigen, for example “binning”. Specific bins are described below.

[0475] Included within the definition of “antibody” is an “antigen-binding portion” of an antibody (also used interchangeably with “antigen-binding fragment”, “antibody fragment” and “antibody derivative”). That is, for the purposes of the invention, an antibody of the invention has a minimum functional requirement that it bind to a PVRIG antigen. As will be appreciated by those in the art, there are a large number of antigen fragments and derivatives that retain the ability to bind an antigen and yet have alternative structures, including, but not limited to, (i) the Fab fragment consisting of VL, VH, CL and CH1 domains, (ii) the Fd fragment consisting of the VH and CH1 domains, (iii) F(ab′)2 fragments, a bivalent fragment comprising two linked Fab fragments (vii) single chain Fv molecules (scFv), wherein a VH domain and a VL domain are linked by a peptide linker which allows the two domains to associate to form an antigen binding site (Bird et al., 1988, Science 242:423-426, Huston et al., 1988, Proc. Natl. Acad. Sci. U.S.A. 85:5879-5883, entirely incorporated by reference), (iv) “diabodies” or “triabodies”, multivalent or multispecific fragments constructed by gene fusion (Tomlinson et. al., 2000, Methods Enzymol. 326:461-479; WO94/13804; Holliger et al., 1993, Proc. Natl. Acad. Sci. U.S.A. 90:6444-6448, all entirely incorporated by reference), (v) “domain antibodies” or “dAb” (sometimes referred to as an “immunoglobulin single variable domain”, including single antibody variable domains from other species such as rodent (for example, as disclosed in WO 00/29004), nurse shark and Camelid V-HH dAbs, (vi) SMIPs (small molecule immunopharmaceuticals), camelbodies, nanobodies and IgNAR. The present invention is directed to monoclonal antibodies that generally are based on the IgG class, which has several subclasses, including, but not limited to IgG1, IgG2, IgG3, and IgG4. In general, IgG1, IgG2 and IgG4 are used more frequently than IgG3. It should be noted that IgG1 has different allotypes with polymorphisms at 356 (D or E) and 358 (L or M). The sequences depicted herein use the 356D/358M allotype, however the other allotype is included herein. That is, any sequence inclusive of an IgG1 Fc domain included herein can have 356E/358L replacing the 356D/358M allotype.

[0476] The amino-terminal portion of each chain includes a variable region of about 100 to 110 or more amino acids primarily responsible for antigen recognition, generally referred to in the art and herein as the “Fv domain” or “Fv region”. In the variable region, three loops are gathered for each of the V domains of the heavy chain and light chain to form an antigen-binding site. Each of the loops is referred to as a complementarity-determining region (hereinafter referred to as a “CDR”), in which the variation in the amino acid sequence is most significant. “Variable” refers to the fact that certain segments of the variable region differ extensively in sequence among antibodies. Variability within the variable region is not evenly distributed. Instead, the V regions consist of relatively invariant stretches called framework regions (FRs) of 15-30 amino acids separated by shorter regions of extreme variability called “hypervariable regions” that are each 9-15 amino acids long or longer.

[0477] Each VH and VL is composed of three hypervariable regions (“complementary determining regions,” “CDRs”) and four FRs, arranged from amino-terminus to carboxy-terminus in the following order: FR1-CDR1-FR2-CDR2-FR3-CDR3-FR4.

[0478] The hypervariable region generally encompasses amino acid residues from about amino acid residues 24-34 (LCDR1; “L” denotes light chain), 50-56 (LCDR2) and 89-97 (LCDR3) in the light chain variable region and around about 31-35B (HCDR1; “H” denotes heavy chain), 50-65 (HCDR2), and 95-102 (HCDR3) in the heavy chain variable region; Kabat et al., SEQUENCES OF PROTEINS OF IMMUNOLOGICAL INTEREST, 5th Ed. Public Health Service, National Institutes of Health, Bethesda, Md. (1991) and/or those residues forming a hypervariable loop (e.g. residues 26-32 (LCDR1), 50-52 (LCDR2) and 91-96 (LCDR3) in the light chain variable region and 26-32 (HCDR1), 53-55 (HCDR2) and 96-101 (HCDR3) in the heavy chain variable region; Chothia and Lesk (1987) J. Mol. Biol. 196:901-917. Specific CDRs of the invention are described below.

[0479] As will be appreciated by those in the art, the exact numbering and placement of the CDRs can be different among different numbering systems. However, it should be understood that the disclosure of a variable heavy and/or variable light sequence includes the disclosure of the associated (inherent) CDRs. Accordingly, the disclosure of each variable heavy region is a disclosure of the vhCDRs (e.g. vhCDR1, vhCDR2 and vhCDR3) and the disclosure of each variable light region is a disclosure of the vlCDRs (e.g. vlCDR1, vlCDR2 and vlCDR3). A useful comparison of CDR numbering is as below, see Lafranc et al., Dev. Comp. Immunol. 27(1):55-77 (2003):

| | Kabat + | | | | | |
|---|---|---|---|---|---|---|
| | Clothia | IMGT | Kabat | AbM | Chothia | Contact |
| vhCDR1 | 26-35 | 27-38 | 31-35 | 26-35 | 26-32 | 30-35 |
| vhCDR2 | 50-65 | 56-65 | 50-65 | 50-58 | 53-55 | 47-58 |
| vhCDR3 | 95-102 | 105-117 | 95-102 | 95-102 | 96-101 | 93-101 |
| vlCDR1 | 24-34 | 27-38 | 24-34 | 24-34 | 26-32 | 30-36 |
| vlCDR2 | 50-56 | 56-65 | 50-56 | 50-56 | 50-52 | 46-55 |
| vlCDR3 | 89-97 | 105-117 | 89-97 | 89-97 | 91-96 | 89-96 |

[0480] Throughout the present specification, the Kabat numbering system is generally used when referring to a residue in the variable domain (approximately, residues 1-107 of the light chain variable region and residues 1-113 of the heavy chain variable region) and the hinge and the EU numbering system for Fc regions (e.g, Kabat et al., supra (1991)).

[0481] The present invention provides a large number of different CDR sets. In this case, a “full CDR set” comprises the three variable light and three variable heavy CDRs, e.g. a vlCDR1, vlCDR2, vlCDR3, vhCDR1, vhCDR2 and vhCDR3. These can be part of a larger variable light or variable heavy domain, respectfully. In addition, as more fully outlined herein, the variable heavy and variable light domains can be on separate polypeptide chains, when a heavy and light chain is used, or on a single polypeptide chain in the case of scFv sequences.

[0482] The CDRs contribute to the formation of the antigen-binding, or more specifically, epitope binding site of antibodies. “Epitope” refers to a determinant that interacts with a specific antigen binding site in the variable region of an antibody molecule known as a paratope. Epitopes are groupings of molecules such as amino acids or sugar side chains and usually have specific structural characteristics, as well as specific charge characteristics. A single antigen may have more than one epitope.

[0483] The epitope may comprise amino acid residues directly involved in the binding (also called immunodominant component of the epitope) and other amino acid residues, which are not directly involved in the binding, such as amino acid residues which are effectively blocked by the specifically antigen binding peptide; in other words, the amino acid residue is within the footprint of the specifically antigen binding peptide.

[0484] Epitopes may be either conformational or linear. A conformational epitope is produced by spatially juxtaposed amino acids from different segments of the linear polypeptide chain. A linear epitope is one produced by adjacent amino acid residues in a polypeptide chain. Conformational and non-conformational epitopes may be distinguished in that the binding to the former but not the latter is lost in the presence of denaturing solvents.

[0485] An epitope typically includes at least 3, and more usually, at least 5 or 8-10 amino acids in a unique spatial conformation. Antibodies that recognize the same epitope can be verified in a simple immunoassay showing the ability of one antibody to block the binding of another antibody to a target antigen, for example “binning.” As outlined below, the invention not only includes the enumerated antigen binding domains and antibodies herein, but those that compete for binding with the epitopes bound by the enumerated antigen binding domains.

[0486] The carboxy-terminal portion of each chain defines a constant region primarily responsible for effector function. Kabat et al. collected numerous primary sequences of the variable regions of heavy chains and light chains. Based on the degree of conservation of the sequences, they classified individual primary sequences into the CDR and the framework and made a list thereof (see SEQUENCES OF IMMUNOLOGICAL INTEREST, 5th edition, NIH publication, No. 91-3242, E. A. Kabat et al., entirely incorporated by reference).

[0487] In the IgG subclass of immunoglobulins, there are several immunoglobulin domains in the heavy chain. By “immunoglobulin (Ig) domain” herein is meant a region of an immunoglobulin having a distinct tertiary structure. Of interest in the present invention are the heavy chain domains, including, the constant heavy (CH) domains and the hinge domains. In the context of IgG antibodies, the IgG isotypes each have three CH regions. Accordingly, “CH” domains in the context of IgG are as follows: “CH1” refers to positions 118-220 according to the EU index as in Kabat. “CH2” refers to positions 237-340 according to the EU index as in Kabat, and “CH3” refers to positions 341-447 according to the EU index as in Kabat.

[0488] Another type of Ig domain of the heavy chain is the hinge region. By “hinge” or “hinge region” or “antibody hinge region” or “immunoglobulin hinge region” herein is meant the flexible polypeptide comprising the amino acids between the first and second constant domains of an antibody. Structurally, the IgG CH1 domain ends at EU position 220, and the IgG CH2 domain begins at residue EU position 237. Thus for IgG the antibody hinge is herein defined to include positions 221 (D221 in IgG1) to 236 (G236 in IgG1), wherein the numbering is according to the EU index as in Kabat.

[0489] The light chain generally comprises two domains, the variable light domain (containing the light chain CDRs and together with the variable heavy domains forming the Fv region), and a constant light chain region (often referred to as CL or Cκ). In general, either the constant lambda or constant kappa domain can be used, with lambda generally finding use in the invention.

[0490] Another region of interest for additional substitutions, outlined below, is the Fc region.

[0491] Still further, an antibody or antigen-binding portion thereof (antigen-binding fragment, antibody fragment, antibody portion) may be part of a larger immunoadhesion molecules (sometimes also referred to as “fusion proteins”), formed by covalent or noncovalent association of the antibody or antibody portion with one or more other proteins or peptides. Examples of immunoadhesion molecules include use of the streptavidin core region to make a tetrameric scFv molecule and use of a cysteine residue, a marker peptide and a C-terminal polyhistidine tag to make bivalent and biotinylated scFv molecules. Antibody portions, such as Fab and F(ab′)₂ fragments, can be prepared from whole antibodies using conventional techniques, such as papain or pepsin digestion, respectively, of whole antibodies. Moreover, antibodies, antibody portions and immunoadhesion molecules can be obtained using standard recombinant DNA techniques, as described herein.

[0492] In general, the anti-PVRIG antibodies of the invention are recombinant. “Recombinant” as used herein, refers broadly with reference to a product, e.g., to a cell, or nucleic acid, protein, or vector, indicates that the cell, nucleic acid, protein or vector, has been modified by the introduction of a heterologous nucleic acid or protein or the alteration of a native nucleic acid or protein, or that the cell is derived from a cell so modified. Thus, for example, recombinant cells express genes that are not found within the native (non-recombinant) form of the cell or express native genes that are otherwise abnormally expressed, under expressed or not expressed at all.

[0493] The term “recombinant antibody”, as used herein, includes all antibodies that are prepared, expressed, created or isolated by recombinant means, such as (a) antibodies isolated from an animal (e.g., a mouse) that is transgenic or transchromosomal for human immunoglobulin genes or a hybridoma prepared therefrom (described further below), (b) antibodies isolated from a host cell transformed to express the human antibody, e.g., from a transfectoma, (c) antibodies isolated from a recombinant, combinatorial human antibody library, and (d) antibodies prepared, expressed, created or isolated by any other means that involve splicing of human immunoglobulin gene sequences to other DNA sequences. Such recombinant human antibodies have variable regions in which the framework and CDR regions are derived from human germline immunoglobulin sequences. In certain embodiments, however, such recombinant human antibodies can be subjected to in vitro mutagenesis (or, when an animal transgenic for human Ig sequences is used, in vivo somatic mutagenesis) and thus the amino acid sequences of the VH and VL regions of the recombinant antibodies are sequences that, while derived from and related to human germline VH and VL sequences, may not naturally exist within the human antibody germline repertoire in vivo.

[0494] A. Chimeric and Humanized Antibodies

[0495] In some embodiments, the anti-PVRIG antibpdies and/or anti-TIGIT antibodies herein can be derived from a mixture from different species, e.g. a chimeric antibody and/or a humanized antibody. In general, both “chimeric antibodies” and “humanized antibodies” refer to antibodies that combine regions from more than one species. For example, “chimeric antibodies” traditionally comprise variable region(s) from a mouse (or rat, in some cases) and the constant region(s) from a human. “Humanized antibodies” generally refer to non-human antibodies that have had the variable-domain framework regions swapped for sequences found in human antibodies. Generally, in a humanized antibody, the entire antibody, except the CDRs, is encoded by a polynucleotide of human origin or is identical to such an antibody except within its CDRs. The CDRs, some or all of which are encoded by nucleic acids originating in a non-human organism, are grafted into the beta-sheet framework of a human antibody variable region to create an antibody, the specificity of which is determined by the engrafted CDRs. The creation of such antibodies is described in, e.g., WO 92/11018, Jones, 1986, Nature 321:522-525, Verhoeyen et al., 1988, Science 239:1534-1536, all entirely incorporated by reference. “Backmutation” of selected acceptor framework residues to the corresponding donor residues is often required to regain affinity that is lost in the initial grafted construct (U.S. Pat. Nos. 5,530,101; 5,585,089; 5,693,761; 5,693,762; 6,180,370; 5,859,205; 5,821,337; 6,054,297; 6,407,213, all entirely incorporated by reference). The humanized antibody optimally also will comprise at least a portion, and usually all, of an immunoglobulin constant region, typically that of a human immunoglobulin, and thus will typically comprise a human Fc region. Humanized antibodies can also be generated using mice with a genetically engineered immune system. Roque et al., 2004, Biotechnol. Prog. 20:639-654, entirely incorporated by reference. A variety of techniques and methods for humanizing and reshaping non-human antibodies are well known in the art (See Tsurushita & Vasquez, 2004, Humanization of Monoclonal Antibodies, Molecular Biology of B Cells, 533-545, Elsevier Science (USA), and references cited therein, all entirely incorporated by reference). Humanization methods include but are not limited to methods described in Jones et al., 1986, Nature 321:522-525; Riechmann et al., 1988; Nature 332:323-329; Verhoeyen et al., 1988, Science, 239:1534-1536; Queen et al., 1989, Proc Natl Acad Sci, USA 86:10029-33; He et al., 1998, J. Immunol. 160: 1029-1035; Carter et al., 1992, Proc Natl Acad Sci USA 89:4285-9, Presta et al., 1997, Cancer Res. 57(20):4593-9; Gorman et al., 1991, Proc. Natl. Acad. Sci. USA 88:4181-4185; O'Connor et al., 1998, Protein Eng 11:321-8, all entirely incorporated by reference. Humanization or other methods of reducing the immunogenicity of nonhuman antibody variable regions may include resurfacing methods, as described for example in Roguska et al., 1994, Proc. Natl. Acad. Sci. USA 91:969-973, entirely incorporated by reference.

[0496] Thus, the vhCDRs and vlCDRs from any of the enumerated antibodies herein may be humanized (or “rehumanized”, for those that were already humanized).

[0497] In certain embodiments, the antibodies of the invention comprise a heavy chain variable region from a particular germline heavy chain immunoglobulin gene and/or a light chain variable region from a particular germline light chain immunoglobulin gene. For example, such antibodies may comprise or consist of a human antibody comprising heavy or light chain variable regions that are “the product of” or “derived from” a particular germline sequence. A human antibody that is “the product of” or “derived from” a human germline immunoglobulin sequence can be identified as such by comparing the amino acid sequence of the human antibody to the amino acid sequences of human germline immunoglobulins and selecting the human germline immunoglobulin sequence that is closest in sequence (i.e., greatest % identity) to the sequence of the human antibody. A human antibody that is “the product of” or “derived from” a particular human germline immunoglobulin sequence may contain amino acid differences as compared to the germline sequence, due to, for example, naturally-occurring somatic mutations or intentional introduction of site-directed mutation. However, a humanized antibody typically is at least 90% identical in amino acids sequence to an amino acid sequence encoded by a human germline immunoglobulin gene and contains amino acid residues that identify the antibody as being derived from human sequences when compared to the germline immunoglobulin amino acid sequences of other species (e.g., murine germline sequences). In certain cases, a humanized antibody may be at least 95, 96, 97, 98 or 99%, or even at least 96%, 97%, 98%, or 99% identical in amino acid sequence to the amino acid sequence encoded by the germline immunoglobulin gene excluding the CDRs. That is, the CDRs may be murine, but the framework regions of the variable region (either heavy or light) can be at least 96%, 97%, 98%, or 99% identical in amino acid sequence to the framework amino acids encoded by one human germline immunoglobulin gene.

[0498] Typically, a humanized antibody derived from a particular human germline sequence will display no more than 10-20 amino acid differences from the amino acid sequence encoded by the human germline immunoglobulin gene. In certain cases, the humanized antibody may display no more than 5, or even no more than 4, 3, 2, or 1 amino acid difference from the amino acid sequence encoded by the germline immunoglobulin gene (again, prior to the introduction of any variants herein; that is, the number of variants is generally low).

[0499] In one embodiment, the parent antibody has been affinity matured, as is known in the art. Structure-based methods may be employed for humanization and affinity maturation, for example as described in U.S. Ser. No. 11/004,590. Selection based methods may be employed to humanize and/or affinity mature antibody variable regions, including but not limited to methods described in Wu et al., 1999, J. Mol. Biol. 294:151-162; Baca et al., 1997, J. Biol. Chem. 272(16):10678-10684; Rosok et al., 1996, J. Biol. Chem. 271(37): 22611-22618; Rader et al., 1998, Proc. Natl. Acad. Sci. USA 95: 8910-8915; Krauss et al., 2003, Protein Engineering 16(10):753-759, all entirely incorporated by reference. Other humanization methods may involve the grafting of only parts of the CDRs, including but not limited to methods described in U.S. Ser. No. 09/810,510; Tan et al., 2002, J. Immunol. 169:1119-1125; De Pascalis et al., 2002, J. Immunol. 169:3076-3084, all entirely incorporated by reference.

[0500] B. PVRIG Antibodies

[0501] The present invention provides anti-PVRIG antibodies. (For convenience, “anti-PVRIG antibodies” and “PVRIG antibodies” are used interchangeably). The anti-PVRIG antibodies of the invention specifically bind to human PVRIG, and preferably the ECD of human PVRIG, as depicted in FIG. 1.

[0502] Specific binding for PVRIG or a PVRIG epitope can be exhibited, for example, by an antibody having a KD of at least about 10⁻⁴ M, at least about 10⁻⁵ M, at least about 10⁻⁶ M, at least about 10⁻⁷ M, at least about 10⁻⁸ M, at least about 10⁻⁹ M, alternatively at least about 10⁻¹⁰ M, at least about 10⁻¹¹ M, at least about 10⁻¹² M, or greater, where KD refers to a dissociation rate of a particular antibody-antigen interaction. Typically, an antibody that specifically binds an antigen will have a KD that is 20-, 50-, 100-, 500-, 1000-, 5,000-, 10,000- or more times greater for a control molecule relative to the PVRIG antigen or epitope.

[0503] However, as shown in the Examples, for optimal binding to PVRIG expressed on the surface of NK and T-cells, the antibodies preferably have a KD less 50 nM and most preferably less than 1 nM, with less than 0.1 nM and less than 1 pM and 0.1 pM finding use in the methods of the invention.

[0504] Also, specific binding for a particular antigen or an epitope can be exhibited, for example, by an antibody having a KA or Ka for a PVRIG, antigen or epitope of at least 20-, 50-, 100-, 500-, 1000-, 5,000-, 10,000- or more times greater for the epitope relative to a control, where KA or Ka refers to an association rate of a particular antibody-antigen interaction.

[0505] In some embodiments, the anti-PVRIG antibodies of the invention bind to human PVRIG with a K_{D} of 100 nM or less, 50 nM or less, 10 nM or less, or 1 nM or less (that is, higher binding affinity), or 1 pM or less, wherein K_{D} is determined by known methods, e.g. surface plasmon resonance (SPR, e.g. Biacore assays), ELISA, KINEXA, and most typically SPR at 25° C. or 37° C.

[0506] C. Specific Anti-PVRIG Antibodies

[0507] The invention provides antigen binding domains, including full length antibodies, which contain a number of specific, enumerated sets of 6 CDRs.

[0508] The antibodies described herein as labeled as follows. The antibodies have reference numbers, for example “CPA.7.013”. This represents the combination of the variable heavy and variable light chains, as depicted in FIG. 4A-4AA and FIG. 5A-5H, for example. “CPA.7.013.VH” refers to the variable heavy portion of CPA.7.013, while “CPA.7.013.VL” is the variable light chain. “CPA.7.013.vhCDR1”, “CPA.7.013.vhCDR2”, “CPA.7.013.vhCDR3”, “CPA.7.013.vlCDR1”, “CPA.7.013.vlCDR2”, and “CPA.7.013.vlCDR3”, refers to the CDRs are indicated. “CPA.7.013.HC” refers to the entire heavy chain (e.g. variable and constant domain) of this molecule, and “CPA.7.013.LC” refers to the entire light light chain (e.g. variable and constant domain) of the same molecule. “CPA.7.013.H1” refers to a full length antibody comprising the variable heavy and light domains, including the constant domain of Human IgG1 (hence, the H1; IgG1, IgG2, IgG3 and IgG4 sequences are shown in FIG. 7). Accordingly, “CPA.7.013.H2” would be the CPA.7.013 variable domains linked to a Human IgG2. “CPA.7.013.H3” would be the CPA.7.013 variable domains linked to a Human IgG3, and “CPA.7.013.H4” would be the CPA.7.013 variable domains linked to a Human IgG4.

[0509] The invention further provides variable heavy and light domains as well as full length heavy and light chains.

[0510] In many embodiments, the antibodies of the invention are human (derived from phage) and block binding of PVRIG and PVLR2. As shown in FIG. 4A-4AA, the CPA antibodies that both bind and block the receptor-ligand interaction are as below, with their components outlined as well:
[0511] CPA.7.001, CPA.7.001.VH, CPA.7.001.VL, CPA.7.001.HC, CPA.7.001.LC and CPA.7.001.H1, CPA.7.001.H2, CPA.7.001.H3, CPA.7.001.H4; CPA.7.001.vhCDR1, CPA.7.001.vhCDR2, CPA.7.001.vhCDR3, CPA.7.001.vlCDR1, CPA.7.001.vlCDR2, and CPA.7.001.vlCDR3;
[0512] CPA.7.003, CPA.7.003.VH, CPA.7.003.VL, CPA.7.003.HC, CPA.7.003.LC, CPA.7.003.H1, CPA.7.003.H2, CPA.7.003.H3, CPA.7.003.H4; CPA.7.003.vhCDR1, CPA.7.003.vhCDR2, CPA.7.003.vhCDR3, CPA.7.003.vlCDR1, CPA.7.003.vlCDR2, and CPA.7.003.vlCDR3;
[0513] CPA.7.004, CPA.7.004.VH, CPA.7.004.VL, CPA.7.004.HC, CPA.7.004.LC, CPA.7.004.H1, CPA.7.004.H2, CPA.7.004.H3 CPA.7.004.H4; CPA.7.004.vhCDR1, CPA.7.004.vhCDR2, CPA.7.004.vhCDR3, CPA.7.004.v1CDR1, CPA.7.004.v1CDR2, and CPA.7.004.v1CDR3;
[0514] CPA.7.006, CPA.7.006.VH, CPA.7.006.VL, CPA.7.006.HC, CPA.7.006.LC, CPA.7.006.H1, CPA.7.006.H2, CPA.7.006.H3 CPA.7.006.H4; CPA.7.006.vhCDR1, CPA.7.006.vhCDR2, CPA.7.006.vhCDR3, CPA.7.006.v1CDR1, CPA.7.006.v1CDR2, and CPA.7.006.v1CDR3;
[0515] CPA.7.008, CPA.7.008.VH, CPA.7.008.VL, CPA.7.008.HC, CPA.7.008.LC, CPA.7.008.H1, CPA.7.008.H2, CPA.7.008.H3 CPA.7.008.H4; CPA.7.008.vhCDR1, CPA.7.008.vhCDR2, CPA.7.008.vhCDR3, CPA.7.008.v1CDR1, CPA.7.008.v1CDR2, and CPA.7.008.v1CDR3;
[0516] CPA.7.009, CPA.7.009.VH, CPA.7.009.VL, CPA.7.009.HC, CPA.7.009.LC, CPA.7.009.H1, CPA.7.009.H2, CPA.7.009.H3 CPA.7.009.H4; CPA.7.009.vhCDR1, CPA.7.009.vhCDR2, CPA.7.009.vhCDR3, CPA.7.009.v1CDR1, CPA.7.009.v1CDR2, and CPA.7.009.v1CDR3;
[0517] CPA.7.010, CPA.7.010.VH, CPA.7.010.VL, CPA.7.010.HC, CPA.7.010.LC, CPA.7.010.H1, CPA.7.010.H2, CPA.7.010.H3 CPA.7.010.H4; CPA.7.010.vhCDR1, CPA.7.010.vhCDR2, CPA.7.010.vhCDR3, CPA.7.010.v1CDR1, CPA.7.010.v1CDR2, and CPA.7.010.v1CDR3;
[0518] CPA.7.011, CPA.7.011.VH, CPA.7.011.VL, CPA.7.011.HC, CPA.7.011.LC, CPA.7.011.H1, CPA.7.011.H2, CPA.7.011.H3 CPA.7.011.H4; CPA.7.011.vhCDR1, CPA.7.011.vhCDR2, CPA.7.011.vhCDR3, CPA.7.011.v1CDR1, CPA.7.011.v1CDR2, and CPA.7.011.v1CDR3;
[0519] CPA.7.012, CPA.7.012.VH, CPA.7.012.VL, CPA.7.012.HC, CPA.7.012.LC, CPA.7.012.H1, CPA.7.012.H2, CPA.7.012.H3 CPA.7.012.H4; CPA.7.012.vhCDR1, CPA.7.012.vhCDR2, CPA.7.012.vhCDR3, CPA.7.012.v1CDR1, CPA.7.012.v1CDR2, and CPA.7.012.v1CDR3;
[0520] CPA.7.013, CPA.7.013.VH, CPA.7.013.VL, CPA.7.013.HC, CPA.7.013.LC, CPA.7.013.H1, CPA.7.013.H2, CPA.7.013.H3 CPA.7.013.H4; CPA.7.013.vhCDR1, CPA.7.013.vhCDR2, CPA.7.013.vhCDR3, CPA.7.013.v1CDR1, CPA.7.013.v1CDR2, and CPA.7.013.v1CDR3;
[0521] CPA.7.014, CPA.7.014. VH, CPA.7.014. VL, CPA.7.014.HC, CPA.7.014.LC, CPA.7.014.H1, CPA.7.014.H2, CPA.7.014.H3 CPA.7.014.H4; CPA.7.014.vhCDR1, CPA.7.014.vhCDR2, CPA.7.014.vhCDR3, CPA.7.014.v1CDR1, CPA.7.014.v1CDR2, and CPA.7.014.v1CDR3;
[0522] CPA.7.015, CPA.7.015. VH, CPA.7.015. VL, CPA.7.015.HC, CPA.7.015.LC, CPA.7.015.H1, CPA.7.015.H2, CPA.7.015.H3 CPA.7.015.H4; CPA.7.015.vhCDR1, CPA.7.015.vhCDR2, CPA.7.015.vhCDR3, CPA.7.015.v1CDR1, CPA.7.015.v1CDR2, and CPA.7.015.v1CDR3;
[0523] CPA.7.017, CPA.7.017. VH, CPA.7.017. VL, CPA.7.017.HC, CPA.7.017.LC, CPA.7.017H1, CPA.7.017.H2, CPA.7.017.H3 CPA.7.017.H4; CPA.7.017.vhCDR1, CPA.7.000171.vhCDR2, CPA.7.017.vhCDR3, CPA.7.017.v1CDR1, CPA.7.017.v1CDR2, and CPA.7.017.v1CDR3;
[0524] CPA.7.018, CPA.7.018. VH, CPA.7.018. VL, CPA.7.018.HC, CPA.7.018.LC, CPA.7.018.H1, CPA.7.018.H2, CPA.7.018.H3 CPA.7.018.H4; CPA.7.017.vhCDR1, CPA.7.017.vhCDR2, CPA.7.017.vhCDR3, CPA.7.017.v1CDR1, CPA.7.017.v1CDR2, and CPA.7.017.v1CDR3;
[0525] CPA.7.019, CPA.7.019. VH, CPA.7.019. VL, CPA.7.019.HC, CPA.7.019.LC, CPA.7.019.H1, CPA.7.019.H2, CPA.7.019.H3 CPA.7.019.H4; CPA.7.019.vhCDR1, CPA.7.019.vhCDR2, CPA.7.019.vhCDR3, CPA.7.019.v1CDR1, CPA.7.019.v1CDR2, and CPA.7.019.v1CDR3;
[0526] CPA.7.021, CPA.7.021 VH, CPA.7.021 VL, CPA.7.021.HC, CPA.7.021.LC, CPA.7.021.H1, CPA.7.021.H2, CPA.7.021.H3 CPA.7.021.H4; CPA.7.021.vhCDR1, CPA.7.021.vhCDR2, CPA.7.021.vhCDR3, CPA.7.021.v1CDR1, CPA.7.021.v1CDR2, and CPA.7.021.v1CDR3;
[0527] CPA.7.022, CPA.7.022. VH, CPA.7.022. VL, CPA.7.022.HC, CPA.7.022.LC, CPA.7.022.H1, CPA.7.022.H2, CPA.7.022.H3 CPA.7.022.H4; CPA.7.022.vhCDR1, CPA.7.022.vhCDR2, CPA.7.002201.vhCDR3, CPA.7.022.v1CDR1, CPA.7.022.v1CDR2, and CPA.7.022.v1CDR3;
[0528] CPA.7.023, CPA.7.023.VH, CPA.7.023.VL, CPA.7.023.HC, CPA.7.023.LC, CPA.7.023.H1, CPA.7.023.H2, CPA.7.023.H3 CPA.7.023.H4; CPA.7.023.vhCDR1, CPA.7.023.vhCDR2, CPA.7.023.vhCDR3, CPA.7.023.v1CDR1, CPA.7.023.v1CDR2, and CPA.7.023.v1CDR3;
[0529] CPA.7.024, CPA.7.024.VH, CPA.7.024.VL, CPA.7.024.HC, CPA.7.024.LC, CPA.7.024.H1, CPA.7.024.H2, CPA.7.024.H3 CPA.7.024.H4; CPA.7.024.vhCDR1, CPA.7.024.vhCDR2, CPA.7.024.vhCDR3, CPA.7.024.v1CDR1, CPA.7.024.v1CDR2, and CPA.7.024.v1CDR3;
[0530] CPA.7.033, CPA.7.033.VH, CPA.7.033.VL, CPA.7.033.HC, CPA.7.033.LC, CPA.7.033.H1, CPA.7.033.H2, CPA.7.033.H3 CPA.7.033.H4; CPA.7.033.vhCDR1, CPA.7.033.vhCDR2, CPA.7.033.vhCDR3, CPA.7.033.v1CDR1, CPA.7.033.v1CDR2, and CPA.7.033.v1CDR3;
[0531] CPA.7.034, CPA.7.034.VH, CPA.7.034.VL, CPA.7.034.HC, CPA.7.034.LC, CPA.7.034.H1, CPA.7.034.H2, CPA.7.034.H3 CPA.7.034.H4; CPA.7.034.vhCDR1, CPA.7.034.vhCDR2, CPA.7.034.vhCDR3, CPA.7.034.v1CDR1, CPA.7.034.v1CDR2, and CPA.7.034.v1CDR3;
[0532] CPA.7.036, CPA.7.036.VH, CPA.7.036.VL, CPA.7.036.HC, CPA.7.036.LC, CPA.7.036.H1, CPA.7.036.H2, CPA.7.036.H3 CPA.7.036.H4; CPA.7.036.vhCDR1, CPA.7.036.vhCDR2, CPA.7.036.vhCDR3, CPA.7.036.v1CDR1, CPA.7.036.v1CDR2, and CPA.7.036.v1CDR3;
[0533] CPA.7.040, CPA.7.040.VH, CPA.7.040.VL, CPA.7.040.HC, CPA.7.040.LC, CPA.7.040.H1, CPA.7.040.H2, CPA.7.040.H3 and CPA.7.040.H4; CPA.7.040.vhCDR1, CPA.7.040.vhCDR2, CPA.7.040.vhCDR3, CPA.7.040.v1CDR1, CPA.7.040.v1CDR2, and CPA.7.040.v1CDR3;
[0534] CPA.7.046, CPA.7.046.VH, CPA.7.046.VL, CPA.7.046.HC, CPA.7.046.LC, CPA.7.046.H1, CPA.7.046.H2, CPA.7.046.H3 CPA.7.046.H4; CPA.7.046.vhCDR1, CPA.7.046.vhCDR2, CPA.7.046.vhCDR3, CPA.7.046.v1CDR1, CPA.7.046.v1CDR2, and CPA.7.046.v1CDR3;
[0535] CPA.7.047, CPA.7.047.VH, CPA.7.047.VL, CPA.7.047.HC, CPA.7.047.LC, CPA.7.047.H1, CPA.7.047.H2, CPA.7.047.H3 CPA.7.047.H4; CPA.7.047.vhCDR1, CPA.7.047.vhCDR2, CPA.7.047.vhCDR3, CPA.7.047.vlCDR1, CPA.7.004701.vlCDR2, and CPA.7.047.vlCDR3;
[0536] CPA.7.049, CPA.7.049. VH, CPA.7.049. VL, CPA.7.049.HC, CPA.7.049.LC, CPA.7.049.H1, CPA.7.049.H2, CPA.7.049.H3 CPA.7.049.H4; CPA.7.049.vhCDR1, CPA.7.049.vhCDR2, CPA.7.049.vhCDR3, CPA.7.049.v1CDR1, CPA.7.049.v1CDR2, and CPA.7.049.v1CDR3; and
[0537] CPA.7.050, CPA.7.050.VH, CPA.7.050.VL, CPA.7.050.HC, CPA.7.050.LC, CPA.7.050.H1, CPA.7.050.H2, CPA.7.050.H3 CPA.7.050.H4, CPA.7.050.vhCDR1, CPA.7.050.vhCDR2, CPA.7.050.vhCDR3, CPA.7.050.vlCDR1, CPA.7.050.v1CDR2, and CPA.7.050.vlCDR3.
[0538] In addition, there are a number of CPA antibodies generated herein that bound to PVRIG but did not block the interaction of PVRIG and PVLR2 as shown in FIG. 5A-5H, the components of which are:
[0539] CPA.7.028, CPA.7.028. VH, CPA.7.028. VL, CPA.7.028.HC, CPA.7.028.LC, CPA.7.028.H1, CPA.7.028.H2, CPA.7.028.H3 and CPA.7.028.H4; CPA.7.028.vhCDR1, CPA.7.028.vhCDR2, CPA.7.028.vhCDR3, CPA.7.028.vlCDR1, CPA.7.028.vlCDR2, and CPA.7.028.vlCDR3.
[0540] CPA.7.030, CPA.7.030.VH, CPA.7.030.VL, CPA.7.030.HC, CPA.7.030.LC, CPA.7.030.H1, CPA.7.030.H2, CPA.7.030.H3 and CPA.7.030.H4; CPA.7.030.vhCDR1, CPA.7.030.vhCDR2, CPA.7.030.vhCDR3, CPA.7.030.vlCDR1, CPA.7.030.vlCDR2, and CPA.7.030.vlCDR3.
[0541] CPA.7.041, CPA.7.041 VH, CPA.7.041 VL, CPA.7.041.HC, CPA.7.041.LC, CPA.7.041.H1, CPA.7.041.H2, CPA.7.041.H3 and CPA.7.041.H4; CPA.7.041.vhCDR1, CPA.7.041.vhCDR2, CPA.7.041.vhCDR3, CPA.7.041.vlCDR1, CPA.7.041.vlCDR2, and CPA.7.041.vlCDR3.
[0542] CPA.7.016, CPA.7.016. VH, CPA.7.016. VL, CPA.7.016.HC, CPA.7.016.LC, CPA.7.016.H1, CPA.7.016.H2, CPA.7.016.H3 and CPA.7.016.H4; CPA.7.016.vhCDR1, CPA.7.016.vhCDR2, CPA.7.016.vhCDR3, CPA.7.016.vlCDR1, CPA.7.016.vlCDR2, and CPA.7.016.vlCDR3.
[0543] CPA.7.020, CPA.7.020.VH, CPA.7.020.VL, CPA.7.020.HC, CPA.7.020.LC, CPA.7.020.H1, CPA.7.020.H2, CPA.7.020.H3 and CPA.7.020.H4; CPA.7.020.vhCDR1, CPA.7.020.vhCDR2, CPA.7.020.vhCDR3, CPA.7.020.vlCDR1, CPA.7.020.vlCDR2, and CPA.7.020.vlCDR3.
[0544] CPA.7.038, CPA.7.038.VH, CPA.7.038.VL, CPA.7.038.HC, CPA.7.038.LC, CPA.7.038.H1, CPA.7.038.H2, CPA.7.038.H3 and CPA.7.038.H4; CPA.7.038.vhCDR1, CPA.7.038.vhCDR2, CPA.7.038.vhCDR3, CPA.7.038.vlCDR1, CPA.7.038.vlCDR2, and CPA.7.038.vlCDR3.
[0545] CPA.7.044, CPA.7.044.VH, CPA.7.044.VL, CPA.7.044.HC, CPA.7.044.LC, CPA.7.044.H1, CPA.7.044.H2, CPA.7.044.H3 and CPA.7.044.H4; CPA.7.044.vhCDR1, CPA.7.044.vhCDR2, CPA.7.044.vhCDR3, CPA.7.044.vlCDR1, CPA.7.044.vlCDR2, and CPA.7.044.vlCDR3.
[0546] CPA.7.045, CPA.7.045.VH, CPA.7.045.VL, CPA.7.045.HC, CPA.7.045.LC, CPA.7.045.H1, CPA.7.045.H2, CPA.7.045.H3 and CPA.7.045.H4; CPA.7.045.vhCDR1, CPA.7.045.vhCDR2, CPA.7.045.vhCDR3, CPA.7.045.vlCDR1, CPA.7.045.v1CDR2, and CPA.7.045.vlCDR3.

[0547] As discussed herein, the invention further provides variants of the above components, including variants in the CDRs, as outlined above. In addition, variable heavy chains can be 80%, 90%, 95%, 98% or 99% identical to the “VH” sequences herein, and/or contain from 1, 2, 3, 4, 5, 6, 7, 8, 9, 10 amino acid changes, or more, when Fc variants are used. Variable light chains are provided that can be 80%, 90%, 95%, 98% or 99% identical to the “VL” sequences herein, and/or contain from 1, 2, 3, 4, 5, 6, 7, 8, 9, 10 amino acid changes, or more, when Fc variants are used. Similarly, heavy and light chains are provided that are 80%, 90%, 95%, 98% or 99% identical to the “HC” and “LC” sequences herein, and/or contain from 1, 2, 3, 4, 5, 6, 7, 8, 9, 10 amino acid changes, or more, when Fc variants are used.

[0548] Furthermore, the present invention provides a number of CHA antibodies, which are murine antibodies generated from hybridomas. As is well known the art, the six CDRs are useful when put into either human framework variable heavy and variable light regions or when the variable heavy and light domains are humanized.

[0549] Accordingly, the present invention provides antibodies, usually full length or scFv domains, that comprise the following CHA sets of CDRs, the sequences of which are shown in FIG. 3A-3AE:
[0550] CHA.7.502.vhCDR1, CHA.7.502.vhCDR2, CHA.7.502.vhCDR3, CHA.7.502.vlCDR1, CHA.7.502.vlCDR2, and CHA.7.502.vlCDR3.
[0551] CHA.7.503.vhCDR1, CHA.7.503.vhCDR2, CHA.7.503.vhCDR3, CHA.7.503.vlCDR1, CHA.7.503.vlCDR2, and CHA.7.503.vlCDR3.
[0552] CHA.7.506.vhCDR1, CHA.7.506.vhCDR2, CHA.7.506.vhCDR3, CHA.7.506.vlCDR1, CHA.7.506.vlCDR2, and CHA.7.506.vlCDR3.
[0553] CHA.7.508.vhCDR1, CHA.7.508.vhCDR2, CHA.7.508.vhCDR3, CHA.7.508.vlCDR1, CHA.7.508.vlCDR2, and CHA.7.508.vlCDR3.
[0554] CHA.7.510.vhCDR1, CHA.7.510.vhCDR2, CHA.7.510.vhCDR3, CHA.7.510.vlCDR1, CHA.7.510.vlCDR2, and CHA.7.510.vlCDR3.
[0555] CHA.7.512.vhCDR1, CHA.7.512.vhCDR2, CHA.7.512.vhCDR3, CHA.7.512.vlCDR1, CHA.7.512.vlCDR2, and CHA.7.512.vlCDR3.
[0556] CHA.7.514.vhCDR1, CHA.7.514.vhCDR2, CHA.7.514.vhCDR3, CHA.7.514.vlCDR1, CHA.7.514.vlCDR2, and CHA.7.514.vlCDR3.
[0557] CHA.7.516.vhCDR1, CHA.7.516.vhCDR2, CHA.7.516.vhCDR3, CHA.7.516.vlCDR1, CHA.7.516.vlCDR2, and CHA.7.516.vlCDR3.
[0558] CHA.7.518.vhCDR1, CHA.7.518.vhCDR2, CHA.7.518.vhCDR3, CHA.7.518.vlCDR1, CHA.7.518.vlCDR2, and CHA.7.518.vlCDR3.
[0559] CHA.7.520_1.vhCDR1, CHA.7.520_1.vhCDR2, CHA.7.520_1.vhCDR3, CHA.7.520_1.vlCDR1, CHA.7.520_1.vlCDR2, and CHA.7.520_1.vlCDR3.
[0560] CHA.7.520_2.vhCDR1, CHA.7.520_2.vhCDR2, CHA.7.520_2.vhCDR3, CHA.7.520_2.vlCDR1, CHA.7.520_2.vlCDR2, and CHA.7.520_2.vlCDR3.
[0561] CHA.7.522.vhCDR1, CHA.7.522.vhCDR2, CHA.7.522.vhCDR3, CHA.7.522.vlCDR1, CHA.7.522.vlCDR2, and CHA.7.522.vlCDR3.
[0562] CHA.7.524.vhCDR1, CHA.7.524.vhCDR2, CHA.7.524.vhCDR3, CHA.7.524.vlCDR1, CHA.7.524.vlCDR2, and CHA.7.524.vlCDR3.
[0563] CHA.7.526.vhCDR1, CHA.7.526.vhCDR2, CHA.7.526.vhCDR3, CHA.7.526.v1CDR1, CHA.7.526.v1CDR2, and CHA.7.526.v1CDR3.
[0564] CHA.7.527.vhCDR1, CHA.7.527.vhCDR2, CHA.7.527.vhCDR3, CHA.7.527.v1CDR1, CHA.7.527.v1CDR2, and CHA.7.527.v1CDR3.
[0565] CHA.7.528.vhCDR1, CHA.7.528.vhCDR2, CHA.7.528.vhCDR3, CHA.7.528.v1CDR1, CHA.7.528.v1CDR2, and CHA.7.528.v1CDR3.
[0566] CHA.7.530.vhCDR1, CHA.7.530.vhCDR2, CHA.7.530.vhCDR3, CHA.7.530.v1CDR1, CHA.7.530.v1CDR2, and CHA.7.530.v1CDR3.
[0567] CHA.7.534.vhCDR1, CHA.7.534.vhCDR2, CHA.7.534.vhCDR3, CHA.7.534.v1CDR1, CHA.7.534.v1CDR2, and CHA.7.534.v1CDR3.
[0568] CHA.7.535.vhCDR1, CHA.7.535.vhCDR2, CHA.7.535.vhCDR3, CHA.7.535.v1CDR1, CHA.7.535.v1CDR2, and CHA.7.535.v1CDR3.
[0569] CHA.7.537.vhCDR1, CHA.7.537.vhCDR2, CHA.7.537.vhCDR3, CHA.7.537.v1CDR1, CHA.7.537.v1CDR2, and CHA.7.537.v1CDR3.
[0570] CHA.7.538_1.vhCDR1, CHA.7.538_1.vhCDR2, CHA.7.538_1.vhCDR3, CHA.7.538_1.vlCDR1, CHA.7.538_1.vlCDR2, and CHA.7.538_1.vlCDR3.
[0571] CHA.7.538_2.vhCDR1, CHA.7.538_2.vhCDR2, CHA.7.538_2.vhCDR3, CHA.7.538_2.vlCDR1, CHA.7.538_2.vlCDR2, and CHA.7.538_2.vlCDR3.
[0572] CHA.7.543.vhCDR1, CHA.7.543.vhCDR2, CHA.7.543.vhCDR3, CHA.7.543.v1CDR1, CHA.7.543.v1CDR2, and CHA.7.543.v1CDR3.
[0573] CHA.7.544.vhCDR1, CHA.7.544.vhCDR2, CHA.7.544.vhCDR3, CHA.7.544.v1CDR1, CHA.7.544.v1CDR2, and CHA.7.544.v1CDR3.
[0574] CHA.7.545.vhCDR1, CHA.7.545.vhCDR2, CHA.7.545.vhCDR3, CHA.7.545.v1CDR1, CHA.7.545.v1CDR2, and CHA.7.545.v1CDR3.
[0575] CHA.7.546.vhCDR1, CHA.7.546.vhCDR2, CHA.7.546.vhCDR3, CHA.7.546.v1CDR1, CHA.7.546.v1CDR2, and CHA.7.546.v1CDR3.
[0576] CHA.7.547.vhCDR1, CHA.7.547.vhCDR2, CHA.7.547.vhCDR3, CHA.7.547.v1CDR1, CHA.7.547.v1CDR2, and CHA.7.547.v1CDR3.
[0577] CHA.7.548.vhCDR1, CHA.7.548.vhCDR2, CHA.7.548.vhCDR3, CHA.7.548.vlCDR1, CHA.7.548.vlCDR2, and CHA.7.548.vlCDR3.
[0578] CHA.7.549.vhCDR1, CHA.7.549.vhCDR2, CHA.7.549.vhCDR3, CHA.7.549.vlCDR1, CHA.7.549.vlCDR2, and CHA.7.549.vlCDR3.
[0579] CHA.7.550.vhCDR1, CHA.7.550.vhCDR2, CHA.7.550.vhCDR3, CHA.7.550.vlCDR1, CHA.7.550.v1CDR2, and CHA.7.550.vlCDR3.

[0580] As above, these sets of CDRs may also be amino acid variants as described above.

[0581] In addition, the framework regions of the variable heavy and variable light chains can be humanized as is known in the art (with occasional variants generated in the CDRs as needed), and thus humanized variants of the VH and VL chains of FIG. 3A-3AE can be generated. Furthermore, the humanized variable heavy and light domains can then be fused with human constant regions, such as the constant regions from IgG1, IgG2, IgG3 and IgG4.

[0582] In particular, as is known in the art, murine VH and VL chains can be humanized as is known in the art, for example, using the IgBLAST program of the NCBI website, as outlined in Ye et al. Nucleic Acids Res. 41:W34-W40 (2013), herein incorporated by reference in its entirety for the humanization methods. IgBLAST takes a murine VH and/or VL sequence and compares it to a library of known human germline sequences. As shown herein, for the humanized sequences generated herein, the databases used were IMGT human VH genes (F+ORF, 273 germline sequences) and IMGT human VL kappa genes (F+ORF, 74 germline sequences). An exemplary five CHA sequences were chosen: CHA.7.518, CHA.7.530, CHA.7.538_1, CHA.7.538_2 and CHA.7.524 (see FIG. 3A-3AE for the VH and VL sequences). For this embodiment of the humanization, human germline IGHV1-46(allele1) was chosen for all 5 as the acceptor sequence and the human heavy chain IGHJ4(allele1) joining region (J gene). For three of four (CHA.7.518, CHA.7.530, CHA.7.538_1 and CHA.7.538_2), human germline IGKV1-39(allele 1) was chosen as the acceptor sequence and human light chain IGKJ2(allele1) (J gene) was chosen. The J gene was chosen from human joining region sequences compiled at IMGT® the international ImMunoGeneTics information system as www.imgt.org. CDRs were defined according to the AbM definition (see www.bioinfo.org.uk/abs/).

[0583] Specific humanized antibodies of CHA antibodies include those shown in FIGS. 25, 26, 27, 28, and 29. As will be appreciated by those in the art, each humanized variable heavy (Humanized Heavy; HH) and variable light (Humanized Light, HL) sequence can be combined with the constant regions of human IgG1, IgG2, IgG3 and IgG4. That is, CHA.7.518.HH1 is the first humanized variable heavy chain, and CHA.7.518.HH1.1 is the full length heavy chain, comprising the “H1” humanized sequence with a IgG1 constant region (CHA.7.518.HH1.2 is CHA.7.518.HH1 with IgG2, etc,).

[0584] In some embodiments, the anti-PVRIG antibodies of the present invention include anti-PVRIG antibodies wherein the V_{H} and V_{L} sequences of different anti-PVRIG antibodies can be “mixed and matched” to create other anti-PVRIG antibodies. PVRIG binding of such “mixed and matched” antibodies can be tested using the binding assays described above. e.g., ELISAs). In some embodiments, when V_{H} and V_{L} chains are mixed and matched, a V_{H} sequence from a particular V_{H}/V_{L} pairing is replaced with a structurally similar V_{H} sequence. Likewise, in some embodiments, a V_{L} sequence from a particular V_{H}/V_{L} pairing is replaced with a structurally similar V_{L} sequence. For example, the V_{H} and V_{L} sequences of homologous antibodies are particularly amenable for mixing and matching.

[0585] Accordingly, the antibodies of the invention comprise CDR amino acid sequences selected from the group consisting of (a) sequences as listed herein; (b) sequences that differ from those CDR amino acid sequences specified in (a) by 1, 2, 3, 4, 5, 6, 7, 8, 9, 10 or more amino acid substitutions; (c) amino acid sequences having 90% or greater, 95% or greater, 98% or greater, or 99% or greater sequence identity to the sequences specified in (a) or (b); (d) a polypeptide having an amino acid sequence encoded by a polynucleotide having a nucleic acid sequence encoding the amino acids as listed herein.

[0586] Additionally included in the definition of PVRIG antibodies are antibodies that share identity to the PVRIG antibodies enumerated herein. That is, in certain embodiments, an anti-PVRIG antibody according to the invention comprises heavy and light chain variable regions comprising amino acid sequences that are homologous to isolated anti-PVRIG amino acid sequences of preferred anti-PVRIG immune molecules, respectively, wherein the antibodies retain the desired functional properties of the parent anti-PVRIG antibodies. The percent identity between the two sequences is a function of the number of identical positions shared by the sequences (i.e., % homology=#of identical positions/total #of positions×100), taking into account the number of gaps, and the length of each gap, which need to be introduced for optimal alignment of the two sequences. The comparison of sequences and determination of percent identity between two sequences can be accomplished using a mathematical algorithm, as described in the non-limiting examples below.

[0587] The percent identity between two amino acid sequences can be determined using the algorithm of E. Meyers and W. Miller (Comput. Appl. Biosci., 4:11-17 (1988)) which has been incorporated into the ALIGN program (version 2.0), using a PAM120 weight residue table, a gap length penalty of 12 and a gap penalty of 4. In addition, the percent identity between two amino acid sequences can be determined using the Needleman and Wunsch (J. Mol. Biol. 48:444-453 (1970)) algorithm which has been incorporated into the GAP program in the GCG software package (available commercially), using either a Blossum 62 matrix or a PAM250 matrix, and a gap weight of 16, 14, 12, 10, 8, 6, or 4 and a length weight of 1, 2, 3, 4, 5, or 6.

[0588] Additionally or alternatively, the protein sequences of the present invention can further be used as a “query sequence” to perform a search against public databases to, for example, identify related sequences. Such searches can be performed using the XBLAST program (version 2.0) of Altschul, et al. (1990) J Mol. Biol. 215:403-10. BLAST protein searches can be performed with the XBLAST program, score=50, wordlength=3 to obtain amino acid sequences homologous to the antibody molecules according to at least some embodiments of the invention. To obtain gapped alignments for comparison purposes, Gapped BLAST can be utilized as described in Altschul et al., (1997) Nucleic Acids Res. 25(17):3389-3402. When utilizing BLAST and Gapped BLAST programs, the default parameters of the respective programs (e.g., XBLAST and NBLAST) can be used.

[0589] In general, the percentage identity for comparison between PVRIG antibodies is at least 75%, at least 80%, at least 90%, with at least about 95, 96, 97, 98 or 99% percent identity being preferred. The percentage identity may be along the whole amino acid sequence, for example the entire heavy or light chain or along a portion of the chains. For example, included within the definition of the anti-PVRIG antibodies of the invention are those that share identity along the entire variable region (for example, where the identity is 95 or 98% identical along the variable regions), or along the entire constant region, or along just the Fc domain.

[0590] In addition, also included are sequences that may have the identical CDRs but changes in the variable domain (or entire heavy or light chain). For example, PVRIG antibodies include those with CDRs identical to those shown in described herein but whose identity along the variable region can be lower, for example 95 or 98% percent identical.

[0591] 1. PVRIG Antibodies that Compete for Binding with Enumerated Antibodies

[0592] The present invention provides not only the enumerated antibodies but additional antibodies that compete with the enumerated antibodies (the CPA and CHA numbers enumerated herein that specifically bind to PVRIG) to specifically bind to the PVRIG molecule. The PVRIG antibodies of the invention “bin” into different epitope bins. There are four separate bins outlined herein; 1) the epitope bin into which CPA.7.002, CPA.7.003, CPA.7.005, CPA.7.007, CPA.7.010, CPA.7.012, CPA.7.015, CPA.7.016, CPA.7.017, CPA.7.019, CPA.7.020, CPA.7.021, CPA.7.024, CPA.7.028, CPA.7.032, CPA.7.033, CPA.7.036, CPA.7.037, CPA.7.038, CPA.7.043, CPA.7.046 and CPA.7.041 all fall into; 2) the epitope bin into which CPA.7.004, CPA.7.009, CPA.7.011, CPA.7.014, CPA.7.018, CPA.7.022, CPA.7.023, CPA.7.034, CPA.7.040, CPA.7.045 and CPA.7.047 all fall; 3) CPA.7.039, which defines the distinction between bin 1 and bin 2, in that bin 1 blocks CPA.7.039 binding and bin 2 sandwiches the ligand with CPA.7.039, and bin 4) with CPA.7.050.

[0593] Thus, the invention provides anti-PVRIG antibodies that compete for binding with antibodies that are in bin 1, with antibodies that are in bin 2, with antibodies that are inbin 3 and/or with antibodies that are in bin 4.

[0594] Additional antibodies that compete with the enumerated antibodies are generated, as is known in the art and generally outlined below. Competitive binding studies can be done as is known in the art, generally using SPR/Biacore® binding assays, as well as ELISA and cell-based assays.

[0595] D. TIGIT Antibodies

[0596] The present invention provides anti-TIGIT antibodies. (For convenience, “anti-TIGIT antibodies” and “TIGIT antibodies” are used interchangeably). The anti-TIGIT antibodies of the invention specifically bind to human TIGIT, and preferably the ECD of human TIGIT. The invention further provides antigen binding domains, including full length antibodies, which contain a number of specific, enumerated sets of 6 CDRs that bind to TIGIT.

[0597] Specific binding for TIGIT or a TIGIT epitope can be exhibited, for example, by an antibody having a K_{D} of at least about 10⁻⁴ M, at least about 10⁻⁵ M, at least about 10⁻⁶ M, at least about 10⁻⁷ M, at least about 10⁻⁸ M, at least about 10⁻⁹ M, alternatively at least about 10⁻¹⁰ M, at least about 10⁻¹¹ M, at least about 10⁻¹² M, at least about 10⁻¹³ M, at least about 10⁻¹⁴ M, at least about 10⁻¹⁵ M, or greater, where K_{D} refers to the equilibrium dissociation constant of a particular antibody-antigen interaction. Typically, an antibody that specifically binds an antigen will have a K_{D} that is 20-, 50-, 100-, 500-, 1000-, 5,000-, 10,000- or more times greater for a control molecule relative to the TIGIT antigen or epitope.

[0598] However, for optimal binding to TIGIT expressed on the surface of NK and T-cells, the antibodies preferably have a KD less 50 nM and most preferably less than 1 nM, with less than 0.1 nM and less than 1 pM finding use in the methods of the invention

[0599] Also, specific binding for a particular antigen or an epitope can be exhibited, for example, by an antibody having a ka (referring to the association rate constant) for a TIGIT antigen or epitope of at least 20-, 50-, 100-, 500-, 1000-, 5,000-, 10,000- or more times greater for the epitope relative to a control, where ka refers to the association rate constant of a particular antibody-antigen interaction.

[0600] In some embodiments, the anti-TIGIT antibodies of the invention bind to human TIGIT with a K_{D} of 100 nM or less, 50 nM or less, 10 nM or less, or 1 nM or less (that is, higher binding affinity), or 1 pM or less, wherein K_{D} is determined by known methods, e.g. surface plasmon resonance (SPR, e.g. Biacore assays), ELISA, KINEXA, and most typically SPR at 25° or 37° C.

[0601] The TIGIT antibodies described herein are labeled as follows. The antibodies have reference numbers, for example “CPA.9.086”. This represents the combination of the variable heavy and variable light chains, as depicted in FIG. 30, for example, with the understanding that these antibodies include two heavy chains and two light chains. “CPA.9.086.VH” refers to the variable heavy portion of CPA. 9. 086, while “CPA. 9. 086.VL” is the variable light chain. “CPA. 9. 086.vhCDR1”, “CPA. 9. 086.vhCDR2”, “CPA. 9. 086.vhCDR3”, “CPA. 9. 086.vlCDR1”, “CPA. 9. 086.vlCDR2”, and “CPA. 9. 086.vlCDR3”, refers to the CDRs are indicated. “CPA. 9. 086.HC” refers to the entire heavy chain (e.g. variable and constant domain) of this molecule, and “CPA. 9. 086.LC” refers to the entire light chain (e.g. variable and constant domain) of the same molecule. In general, the human kappa light chain is used for the constant domain of each phage (or humanized hybridoma) antibody herein, although in some embodiments the lambda light constant domain is used. “CPA. 9. 086.111” refers to a full length antibody comprising the variable heavy and light domains, including the constant domain of Human IgG1 (hence, the H1; IgG1, IgG2, IgG3 and IgG4 sequences are shown in FIG. 7). Accordingly, “CPA. 9. 086.112” would be the CPA. 9. 086 variable domains linked to a Human IgG2. “CPA. 9. 086.113” would be the CPA. 9. 086 variable domains linked to a Human IgG3, and “CPA. 9. 086.114” would be the CPA. 9. 086 variable domains linked to a Human IgG4. Note that in some cases, the human IgGs may have additional mutations, such are described below, and this can be annotated. For example, in many embodiments, there may be a S241P mutation in the human IgG4, and this can be annotated as “CPA.9.086.H4(S241P)” for example. The human IgG4 sequence with this S241P hinge variant is shown in FIG. 7. Other potential variants are IgG1(N297A), (or other variants that ablate glycosylation at this site and thus many of the effector functions associated with FcγRIIIa binding), and IgG1(D265A), which reduces binding to FcγR receptors.

[0602] The invention further provides variable heavy and light domains as well as full length heavy and light chains.

[0603] In some embodiments, the invention provides scFvs that bind to TIGIT comprising a variable heavy domain and a variable light domain linked by an scFv linker as outlined above. The VL and VH domains can be in either orientation, e.g., from N- to C-terminus “VH-linker-VL” or “VL-linker-VH”. These are named by their component parts; for example, “scFv-CPA. 9.086 VH-linker-VL” or “scFv-CPA.9.086.VL-linker-VH.” Thus, “scFv-CPA.9.086” can be in either orientation.

[0604] In many embodiments, the antibodies of the invention are human (derived from phage) and block binding of TIGIT and PVR. As shown in FIG. 30, the CPA antibodies that both bind and block the receptor-ligand interaction are as below, with their components outlined as well (as discussed in the “Sequence” section, the sequences of all but the scFv constructs are in the sequence listing):
[0605] CPA.9.018, CPA.9.018.VH, CPA.9.018.VL, CPA.9.018.HC, CPA.9.018.LC, CPA.9.018.H1, CPA.9.018.H2, CPA.9.018.H3, CPA.9.018.H4; CPA.9.018.H4(S241P); CPA.9.018.vhCDR1, CPA.9.018.vhCDR2, CPA.9.018.vhCDR3, CPA.9.018.v1CDR1, CPA.9.018.v1CDR2, CPA.9.018.v1CDR3 and scFv-CPA.9.018;
[0606] CPA.9.027, CPA.9.027.VH, CPA.9.027.VL, CPA.9.027.HC, CPA.9.027.LC, CPA.9.027.H1, CPA.9.027.H2, CPA.9.027.H3, CPA.9.027.H4; CPA.9.018.H4(S241P); CPA.9.027.vhCDR1, CPA.9.027.vhCDR2, CPA.9.027.vhCDR3, CPA.9.027.v1CDR1, CPA.9.027.v1CDR2, CPA.9.027.v1CDR3 and scFv-CPA.9.027;
[0607] CPA.9.049, CPA.9.049.VH, CPA.9.049.VL, CPA.9.049.HC, CPA.9.049.LC, CPA.9.049.H1, CPA.9.049.H2, CPA.9.049.H3; CPA.9.049.H4; CPA.9.049.H4(S241P); CPA.9.049.vhCDR1, CPA.9.049.vhCDR2, CPA.9.049.vhCDR3, CPA.9.049.v1CDR1, CPA.9.049.v1CDR2, CPA.9.049.v1CDR3 and scFv-CPA.9.049;
[0608] CPA.9.057, CPA.9.057.VH, CPA.9.057.VL, CPA.9.057.HC, CPA.9.057.LC, CPA.9.057.H1, CPA.9.057.H2, CPA.9.057.H3; CPA.9.057.H4; CPA.9.057.H4(S241P); CPA.9.057.vhCDR1, CPA.9.057.vhCDR2, CPA.9.057.vhCDR3, CPA.9.057.v1CDR1, CPA.9.057.v1CDR2, CPA.9.057.v1CDR3 and scFv-CPA.9.057;
[0609] CPA.9.059, CPA.9.059.VH, CPA.9.059.VL, CPA.9.059.HC, CPA.9.059.LC, CPA.9.059.H1, CPA.9.059.H2, CPA.9.059.H3; CPA.9.059.H4; CPA.9.059.H4(S241P); CPA.9.059.vhCDR1, CPA.9.059.vhCDR2, CPA.9.059.vhCDR3, CPA.9.059.v1CDR1, CPA.9.059.v1CDR2, CPA.9.059.v1CDR3 and scFv-CPA.9.059;
[0610] CPA.9.083, CPA.9.083.VH, CPA.9.083.VL, CPA.9.083.HC, CPA.9.083.LC, CPA.9.083.H1, CPA.9.083.H2, CPA.9.083.H3; CPA.9.083.H4; CPA.9.083.H4(S241P); CPA.9.083.vhCDR1, CPA.9.083.vhCDR2, CPA.9.083.vhCDR3, CPA.9.083.v1CDR1, CPA.9.083.v1CDR2, CPA.9.083.v1CDR3 and scFv-CPA.9.083;
[0611] CPA.9.086, CPA.9.086.VH, CPA.9.086.VL, CPA.9.086.HC, CPA.9.086.LC, CPA.9.086.H1, CPA.9.086.H2, CPA.9.086.H3; CPA.9.086.H4; CPA.9.086.H4(S241P); CPA.9.086.vhCDR1, CPA.9.086.vhCDR2, CPA.9.086.vhCDR3, CPA.9.086.v1CDR1, CPA.9.086.v1CDR2, CPA.9.086.v1CDR3 and scFv-CPA.9.086;
[0612] CPA.9.089, CPA.9.089.VH, CPA.9.089.VL, CPA.9.089.HC, CPA.9.089.LC, CPA.9.089.H1, CPA.9.089.H2, CPA.9.089.H3; CPA.9.089.H4; CPA.9.089.H4(S241P); CPA.9.089.vhCDR1, CPA.9.089.vhCDR2, CPA.9.089.vhCDR3, CPA.9.089.vlCDR1, CPA.9.089.vlCDR2, CPA.9.089.vlCDR3 and scFv-CPA.9.089;
[0613] CPA.9.093, CPA.9.093.VH, CPA.9.093.VL, CPA.9.093.HC, CPA.9.093.LC, CPA.9.093.H1, CPA.9.093.H2, CPA.9.093.H3; CPA.9.093.H4; CPA.9.093.H4(S241P); CPA.9.093.vhCDR1, CPA.9.093.vhCDR2, CPA.9.093.vhCDR3, CPA.9.093.vlCDR1, CPA.9.093.vlCDR2, CPA.9.093.vlCDR3 and scFv-CPA.9.093;
[0614] CPA.9.101, CPA.9.101.VH, CPA.9.101.VL, CPA.9.101.HC, CPA.9.101.LC, CPA.9.101.H1, CPA.9.101.H2, CPA.9.101.H3; CPA.9.101.H4; CPA.9.101.H4(S241P); CPA.9.101.vhCDR1, CPA.9.101.vhCDR2, CPA.9.101.vhCDR3, CPA.9.101.v1CDR1, CPA.9.101.v1CDR2, CPA.9.101.v1CDR3 and scFv-CPA.9.101; and
[0615] CPA.9.103, CPA.9.103.VH, CPA.9.103.VL, CPA.9.103.HC, CPA.9.103.LC, CPA.9.103.H1, CPA.9.103.H2, CPA.9.103.H3; CPA.9.103.H4; CPA.9.103.H4(S241P); CPA.9.103.vhCDR1, CPA.9.103.vhCDR2, CPA.9.103.vhCDR3, CPA.9.103.vlCDR1, CPA.9.103.v1CDR2, CPA.9.103.vlCDR3 and scFv-CPA.9.103.

[0616] Furthermore, the present invention provides a number of CHA antibodies, which are murine antibodies generated from hybridomas. As is well known the art, the six CDRs are useful when put into either human framework variable heavy and variable light regions or when the variable heavy and light domains are humanized.

[0617] Accordingly, the present invention provides antibodies, usually full length or scFv domains, that comprise the following sets of CDRs, the sequences of which are shown in FIG. 30 and/or the sequence listing:
[0618] CHA.9.536.1, CHA.9.536.1.VH, CHA.9.536.1.VL, CHA.9.536.1.HC, CHA.9.536.1.LC, CHA.9.536.1.H1, CHA.9.536.1.H2, CHA.9.536.1.H3; CHA.9.536.1.H4, CHA.9.536.1.H4(S241P), CHA.9.536.1.vhCDR1, CHA.9.536.1.vhCDR2, CHA.9.536.1.vhCDR3, CHA.9.536.1.vlCDR1, CHA.9.536.1.vlCDR2 and CHA.9.536.1.vhCDR3;
[0619] CHA.9.536.3, CHA.9.536.3.VH, CHA.9.536.3.VL, CHA.9.536.3.HC, CHA.9.536.3.LC, CHA.9.536.3.H1, CHA.9.536.3.H2, CHA.9.536.3.H3; CHA.9.536.3.H4, CHA.9.536.3.H4(S241P); CHA.9.536.3.vhCDR1, CHA.9.536.3.vhCDR2, CHA.9.536.3.vhCDR3, CHA.9.536.3.v1CDR1, CHA.9.536.3.v1CDR2 and CHA.9.536.3.vhCDR3;
[0620] CHA.9.536.4, CHA.9.536.4.VH, CHA.9.536.4.VL, CHA.9.536.4.HC, CHA.9.536.4.LC, CHA.9.536.4.H1, CHA.9.536.4.H2, CHA.9.536.4.H3; CHA.9.536.4.H4, CHA.9.536.4.H4(S241P), CHA.9.536.4.vhCDR1, CHA.9.536.4.vhCDR2, CHA.9.536.4.vhCDR3, CHA.9.536.4.v1CDR1, CHA.9.536.4.v1CDR2 and CHA.9.536.4.vhCDR3;
[0621] CHA.9.536.5, CHA.9.536.5.VH, CHA.9.536.5.VL, CHA.9.536.5.HC, CHA.9.536.5.LC, CHA.9.536.5.H1, CHA.9.536.5.H2, CHA.9.536.5.H3; CHA.9.536.5.H4, CHA.9.536.5.H4(S241P), CHA.9.536.5.vhCDR1, CHA.9.536.5.vhCDR2, CHA.9.536.5.vhCDR3, CHA.9.536.5.v1CDR1, CHA.9.536.5.v1CDR2 and CHA.9.536.5.vhCDR3;
[0622] CHA.9.536.6, CHA.9.536.6.VH, CHA.9.536.6.VL, CHA.9.536.6.HC, CHA.9.536.6.LC, CHA.9.536.6.H1, CHA.9.536.6.H2, CHA.9.536.6.H3; CHA.9.536.6.H4, CHA.9.536.6.vhCDR1, CHA.9.536.6.vhCDR2, CHA.9.536.6.vhCDR3, CHA.9.536.6.v1CDR1, CHA.9.536.6.v1CDR2 and CHA.9.536.6.vhCDR3;
[0623] CHA.9.536.7, CHA.9.536.7.VH, CHA.9.536.7.VL, CHA.9.536.7.HC, CHA.9.536.7.LC, CHA.9.536.7.H1, CHA.9.536.7.H2, CHA.9.536.7.H3; CHA.9.536.7.H4, CHA.9.536.5.H4(S241P); CHA.9.536.7.vhCDR1, CHA.9.536.7.vhCDR2, CHA.9.536.7.vhCDR3, CHA.9.536.7.v1CDR1, CHA.9.536.7.v1CDR2 and CHA.9.536.7.vhCDR3;
[0624] CHA.9.536.8, CHA.9.536.8.VH, CHA.9.536.8.VL, CHA.9.536.8.HC, CHA.9.536.8.LC, CHA.9.536.8.H1, CHA.9.536.8.H2, CHA.9.536.8.H3; CHA.9.536.8.H4, CHA.9.536.8.H4(S241P), CHA.9.536.8.vhCDR1, CHA.9.536.8.vhCDR2, CHA.9.536.8.vhCDR3, CHA.9.536.8.v1CDR1, CHA.9.536.8.v1CDR2 and CHA.9.536.8.vhCDR3;
[0625] CHA.9.560.1, CHA. 9.560.1VH, CHA. 9.560.1.VL, CHA. 9.560.1.HC, CHA. 9.560.1.LC, CHA. 9.560.1.H1, CHA. 9.560.1.H2, CHA. 9.560.1.H3; CHA. 9.560.1.H4, CHA. 9.560.1.H4(S241P), CHA. 9.560.1.vhCDR1, CHA. 9.560.1.vhCDR2, CHA. 9.560.1.vhCDR3, CHA. 9.560.1.v1CDR1, CHA. 9.560.1.v1CDR2 and CHA. 9.560.1.vhCDR3;
[0626] CHA.9.560.3, CHA. 9.560. 3VH, CHA. 9.560. 3.VL, CHA. 9.560. 3.HC, CHA. 9.560. 3.LC, CHA. 9.560. 3.H1, CHA. 9.560. 3.H2, CHA. 9.560. 3.H3; CHA.9.560.3.H4, CHA.9.560.3.H4(S241P); CHA. 9.560. 3.vhCDR1, CHA. 9.560. 3.vhCDR2, CHA. 9.560. 3.vhCDR3, CHA. 9.560. 3.vlCDR1, CHA. 9.560. 3.vlCDR2 and CHA. 9.560. 3.vhCDR3;
[0627] CHA.9.560.4, CHA. 9.560. 4VH, CHA. 9.560. 4.VL, CHA. 9.560. 4.HC, CHA. 9.560. 4.LC, CHA. 9.560. 4.H1, CHA. 9.560. 4.H2, CHA. 9.560. 4.H3; CHA.9.560.4.H4, CHA.9.560.4.H4(S241P), CHA. 9.560. 4.vhCDR1, CHA. 9.560. 4.vhCDR2, CHA. 9.560. 4.vhCDR3, CHA. 9.560. 4.vlCDR1, CHA. 9.560. 4.vlCDR2 and CHA. 9.560. 4.vhCDR3;
[0628] CHA.9.560.5, CHA. 9.560. 5VH, CHA. 9.560. 5.VL, CHA. 9.560. 5.HC, CHA. 9.560. 5.LC, CHA. 9.560. 5.H1, CHA. 9.560. 5.H2, CHA. 9.560. 5.H3; CHA. 9.560. 5.H4, CHA. 9.560. 5.vhCDR1, CHA. 9.560. 5.vhCDR2, CHA. 9.560. 5.vhCDR3, CHA. 9.560. 5.vlCDR1, CHA. 9.560. 5.vlCDR2 and CHA. 9.560. 5.vhCDR3;
[0629] CHA.9.560.6, CHA. 9.560. 6VH, CHA. 9.560. 6.VL, CHA. 9.560. 6.HC, CHA. 9.560. 6.LC, CHA. 9.560. 6.H1, CHA. 9.560. 6.H2, CHA. 9.560. 6.H3; CHA.9.560.6.H4, CHA.9.560.6.H4(S241P), CHA. 9.560. 6.vhCDR1, CHA. 9.560. 6.vhCDR2, CHA. 9.560. 6.vhCDR3, CHA. 9.560. 6.vlCDR1, CHA. 9.560. 6.vlCDR2 and CHA. 9.560. 6.vhCDR3;
[0630] CHA.9.560.7, CHA. 9.560. 7VH, CHA. 9.560. 7.VL, CHA. 9.560. 7.HC, CHA. 9.560. 7.LC, CHA. 9.560. 7.H1, CHA. 9.560. 7.H2, CHA. 9.560. 7.H3; CHA.9.560.7.H4; CHA.9.560.7.H4(S241P); CHA. 9.560. 7.vhCDR1, CHA. 9.560. 7.vhCDR2, CHA. 9.560. 7.vhCDR3, CHA. 9.560. 7.vlCDR1, CHA. 9.560. 7.vlCDR2 and CHA. 9.560. 7.vhCDR3;
[0631] CHA.9.560.8, CHA. 9.560. 8VH, CHA. 9.560. 8.VL, CHA. 9.560. 8.HC, CHA. 9.560. 8.LC, CHA. 9.560. 8.H1, CHA. 9.560. 8.H2, CHA. 9.560. 8.H3; CHA.9.560.8.H4, CHA.9.560.8.H4(S241P); CHA. 9.560. 8.vhCDR1, CHA. 9.560. 8.vhCDR2, CHA. 9.560. 8.vhCDR3, CHA. 9.560. 8.vlCDR1, CHA. 9.560. 8.vlCDR2 and CHA. 9.560. 8.vhCDR3;
[0632] CHA.9.546.1, CHA. 9. 546.1VH, CHA. 9. 546.1VL, CHA. 9. 546.1.HC, CHA. 9. 546.1.LC, CHA. 9. 546.1.H1, CHA. 9. 546.1.H2, CHA. 9. 546.1.H3; CHA.9.546.1.H4, CHA.9.546.1.H4(S241P), CHA. 9. 546.1.vhCDR1, CHA. 9. 546.1.vhCDR2, CHA. 9. 546.1.vhCDR3, CHA. 9. 546.1.v1CDR1, CHA. 9. 546.1.v1CDR2 and CHA. 9. 546.1.vhCDR3;
[0633] CHA.9.547.1, CHA. 9. 547.1VH, CHA. 9. 547.1.VL, CHA. 9. 547.1.HC, CHA. 9. 547.1.LC, CHA. 9. 547.1.H1, CHA. 9. 547.1.H2, CHA. 9. 547.1.H3; CHA.9.547.1.H4, CHA.9.547.1.H4(S241P), CHA. 9. 547.1.vhCDR1, CHA. 9. 547.1.vhCDR2, CHA. 9. 547.1.vhCDR3, CHA. 9. 547.1.v1CDR1, CHA. 9. 547.1.v1CDR2 and CHA. 9. 547.1.vhCDR3;
[0634] CHA.9.547.2, CHA. 9. 547. 2VH, CHA. 9. 547. 2.VL, CHA. 9. 547. 2.HC, CHA. 9. 547. 2.LC, CHA. 9. 547. 2.H1, CHA. 9. 547. 2.H2, CHA. 9. 547. 2.H3; CHA.9.547.2.H4, CHA.9.547.2.H4(S241P), CHA. 9. 547. 2.vhCDR1, CHA. 9. 547. 2.vhCDR2, CHA. 9. 547. 2.vhCDR3, CHA. 9. 547. 2.vlCDR1, CHA. 9. 547. 2.vlCDR2 and CHA. 9. 547. 2.vhCDR3;
[0635] CHA.9.547.3, CHA. 9. 547. 3VH, CHA. 9. 547. 3.VL, CHA. 9. 547. 3.HC, CHA. 9. 547. 3.LC, CHA. 9. 547. 3.H1, CHA. 9. 547. 3.H2, CHA. 9. 547. 3.H3; CHA.9.547.3.H4, CHA.9.547.3.H4(S241P), CHA. 9. 547. 3.vhCDR1, CHA. 9.547. 3.vhCDR2, CHA. 9. 547. 3.vhCDR3, CHA. 9. 547. 3.vlCDR1, CHA. 9. 547. 3.vlCDR2 and CHA. 9. 547. 3.vhCDR3;
[0636] CHA.9.547.4, CHA. 9. 547. 4VH, CHA. 9. 547. 4.VL, CHA. 9. 547. 4.HC, CHA. 9.547. 4.LC, CHA. 9. 547. 4.H1, CHA. 9. 547. 4.H2, CHA. 9. 547. 4.H3; CHA.9.547.4.H4, CHA.9.547.4.H4(S241P), CHA. 9. 547. 4.vhCDR1, CHA. 9. 547. 4.vhCDR2, CHA. 9. 547. 4.vhCDR3, CHA. 9. 547. 4.vlCDR1, CHA. 9. 547. 4.vlCDR2 and CHA. 9. 547. 4.vhCDR3;
[0637] CHA.9.547.6, CHA. 9. 547. 6 VH, CHA. 9. 547. 6.VL, CHA. 9. 547. 6.HC, CHA. 9. 547. 6.LC, CHA. 9. 547. 6.H1, CHA. 9. 547. 6.H2, CHA. 9. 547. 6.H3; CHA.9.547.6.H4, CHA.9.547.6.H4(S241P), CHA. 9. 547. 6.vhCDR1, CHA. 9. 547. 6.vhCDR2, CHA. 9. 547. 6.vhCDR3, CHA. 9. 547. 6.vlCDR1, CHA. 9. 547. 6.vlCDR2 and CHA. 9. 547. 6.vhCDR3;
[0638] CHA.9.547.7, CHA. 9. 547. 7VH, CHA. 9. 547. 7.VL, CHA. 9. 547. 7.HC, CHA. 9. 547. 7.LC, CHA. 9. 547. 7.H1, CHA. 9. 547. 7.H2, CHA. 9. 547. 7.H3; CHA.9.547.7.H4, CHA.9.547.7.H4(S241P), CHA. 9. 547. 7.vhCDR1, CHA. 9. 547. 7.vhCDR2, CHA. 9. 547. 7.vhCDR3, CHA. 9. 547. 7.vlCDR1, CHA. 9. 547. 7.vlCDR2 and CHA. 9. 547. 7.vhCDR3;
[0639] CHA.9.547.8, CHA. 9. 547. 8VH, CHA. 9. 547. 8.VL, CHA. 9. 547. 8.HC, CHA.9.547.8.LC, CHA. 9. 547. 8.H1, CHA. 9. 547. 8.H2, CHA. 9. 547. 8.H3; CHA.9.547.8.H4, CHA.9.547.8.H4(S241P), CHA. 9. 547. 8.vhCDR1, CHA. 9. 547. 8.vhCDR2, CHA. 9. 547. 8.vhCDR3, CHA. 9. 547. 8.vlCDR1, CHA. 9. 547. 8.vlCDR2 and CHA. 9. 547. 8.vhCDR3;
[0640] CHA.9.547.9, CHA.9.547.9, CHA.9.547.9VH, CHA.9.547.9.VL, CHA.9. 547.9.HC, CHA.9.547.9.LC, CHA.9.547.9.H1, CHA.9.547.9.H2, CHA.9.547.9.H3; CHA.9.547.9.H4, CHA.9.547.9.H4, CHA.9.547.9.H4(S241P), CHA.9.547.9.H4(S241P), CHA.9.547.9.vhCDR1, CHA.9.547.9.vhCDR2, CHA.9.547.9.vhCDR3, CHA.9.547.9.v1CDR1, CHA.9.547.9.v1CDR2 and CHA.9.547.9.vhCDR3;
[0641] CHA.9.547.13, CHA.9.547.13, CHA.9.547. 13VH, CHA.9. 547.13.VL, CHA.9. 547.13.HC, CHA. 9.547.13.LC, CHA. 9.547.13.H1, CHA.9.547.13.H2, CHA.9. 547.13.H3; CHA.9.547.13.H4, CHA.9.547.13.H4, CHA.9.547.13.H4(S241P), CHA.9.547.13.H4(S241P), CHA. 9. 547.13.vhCDR1, CHA.9.547.13.vhCDR2, CHA.9.547. 13.vhCDR3, CHA. 9. 547.13.v1CDR1, CHA. 9. 547.13.v1CDR2 and CHA. 9. 547. 13.vhCDR3;
[0642] CHA.9.541.1, CHA. 9. 541.1.VH, CHA. 9. 541.1.VL, CHA. 9. 541.1.HC, CHA. 9. 541.1.LC, CHA. 9. 541.1.H1, CHA. 9. 541.1.H2, CHA. 9. 541.1.H3; CHA.9.541.1.H4, CHA.9.541.1.H4(S241P), CHA. 9. 541.1.vhCDR1, CHA. 9. 541.1.vhCDR2, CHA. 9. 541.1.vhCDR3, CHA. 9. 541.1.v1CDR1, CHA. 9. 541.1.v1CDR2 and CHA. 9.541.1.vhCDR3;
[0643] CHA.9.541.3, CHA. 9. 541. 3. VH, CHA. 9. 541. 3.VL, CHA. 9. 541. 3.HC, CHA. 9. 541. 3.LC, CHA. 9. 541. 3.H1, CHA. 9. 541. 3.H2, CHA. 9. 541. 3.H3; CHA.9.541.3.H4, CHA.9.541.3.H4(S241P), CHA. 9. 541. 3.vhCDR1, CHA. 9. 541. 3.vhCDR2, CHA. 9. 541. 3.vhCDR3, CHA. 9. 541. 3.vlCDR1, CHA. 9. 541. 3.vlCDR2 and CHA. 9.541. 3.vhCDR3;
[0644] CHA.9.541.4, CHA. 9. 541.4.VH, CHA. 9. 541. 4.VL, CHA. 9. 541. 4.HC, CHA. 9. 541. 4.LC, CHA. 9. 541. 4.H1, CHA. 9. 541. 4.H2, CHA. 9. 541. 4.H3; CHA.9.541.4.H4, CHA.9.541.4.H4(S241P), CHA. 9. 541. 4.vhCDR1, CHA. 9. 541. 4.vhCDR2, CHA. 9. 541. 4.vhCDR3, CHA. 9. 541. 4.vlCDR1, CHA. 9. 541. 4.vlCDR2 and CHA. 9.541. 4.vhCDR3;
[0645] CHA.9.541.5, CHA. 9. 541. 5. VH, CHA. 9. 541. 5.VL, CHA. 9. 541. 5.HC, CHA. 9. 541. 5.LC, CHA. 9. 541. 5.H1, CHA. 9. 541. 5.H2, CHA. 9. 541. 5.H3; CHA.9.541.5.H4, CHA.9.541.5.H4(S241P), CHA. 9. 541. 5.vhCDR1, CHA. 9. 541. 5.vhCDR2, CHA. 9. 541. 5.vhCDR3, CHA. 9. 541. 5.vlCDR1, CHA. 9. 541. 5.vlCDR2 and CHA. 9.541. 5.vhCDR3;
[0646] CHA.9.541.6, CHA. 9. 541. 6. VH, CHA. 9. 541. 6.VL, CHA. 9. 541. 6.HC, CHA. 9. 541. 6.LC, CHA. 9. 541. 6.H1, CHA. 9. 541. 6.H2, CHA. 9. 541.6.H3; CHA.9.541.6.H4, CHA.9.541.6.H4(S241P), CHA. 9. 541. 6.vhCDR1, CHA. 9. 541. 6.vhCDR2, CHA. 9. 541. 6.vhCDR3, CHA. 9. 541. 6.vlCDR1, CHA. 9. 541. 6.vlCDR2 and CHA. 9.541. 6.vhCDR3;
[0647] CHA.9.541.7, CHA. 9. 541. 7.VH, CHA. 9. 541. 7.VL, CHA. 9. 541. 7.HC, CHA. 9. 541. 7.LC, CHA. 9. 541. 7.H1, CHA. 9. 541. 7.H2, CHA. 9. 541. 7.H3; CHA.9.541.7.H4, CHA.9.541.7.H4(S241P), CHA. 9. 541. 7.vhCDR1, CHA. 9. 541. 7.vhCDR2, CHA. 9. 541. 7.vhCDR3, CHA. 9. 541. 7.vlCDR1, CHA. 9. 541. 7.vlCDR2 and CHA. 9.541. 7.vhCDR3; and
[0648] CHA.9.541.8, CHA. 9. 541. 8. VH, CHA. 9. 541. 8.VL, CHA. 9. 541. 8.HC, CHA. 9. 541. 8.LC, CHA. 9. 541. 8.H1, CHA. 9. 541. 8.H2, CHA. 9. 541. 8.H3; CHA.9.541.8.H4, CHA.9.541.8.H4(S241P); CHA. 9. 541. 8vhCDR1, CHA. 9. 541. 8.vhCDR2, CHA. 9. 541. 8.vhCDR3, CHA. 9. 541. 8.vlCDR1, CHA. 9. 541. 8.vlCDR2 and CHA. 9.541. 8.vhCDR3.

[0649] In the case of scFvs comprising the CDRs of the antibodies above, these are labeled as scFvs that include a scFv comprising a variable heavy domain with the vhCDRs, a linker and a variable light domain with the vlCDRs, again as above in either orientation. Thus the invention includes scFv-CHA.9.536.3.1, scFv-CHA.9.536.3, scFv-CHA.9.536.4, scFv-CHA.9.536.5, scFv-CHA.9.536.7, scFv-CHA.9.536.8, scFv-CHA.9.560.1, scFv-CHA.9.560.3, scFv-CHA.9.560.4, scFv-CHA.9.560.5, scFv-CHA.9.560.6, scFv-CHA.9.560.7, scFv-CHA.9.560.8, scFv-CHA.9.546.1, scFv-CHA.9.547.1, scFv-CHA.9.547.2, scFv-CHA.9.547.3, scFv-CHA.9.547.4, scFv-CHA.9.547.6, scFv-CHA.9.547.7, scFv-CHA.9.547.8, scFv-CHA.9.547.9, scFv-CHA.9.547.13, scFv-CHA.9.541.1, scFv-CHA.9.541.3, scFv-CHA.9.541.4, scFv-CHA.9.541.5, scFv-CHA.9.541.6, scFv-CHA.9.541.7 and scFv-CHA.9.541.8.

[0650] In addition, CHA.9.543 binds to TIGIT but does not block the TIGIT-PVR interaction.

[0651] As discussed herein, the invention further provides variants of the above components (CPA and CHA), including variants in the CDRs, as outlined above. Thus, the invention provides antibodies comprising a set of 6 CDRs as outlined herein that can contain one, two or three amino acid differences in the set of CDRs, as long as the antibody still binds to TIGIT. Suitable assays for testing whether an anti-TIGIT antibody that contains mutations as compared to the CDR sequences outlined herein are known in the art, such as Biacore assays.

[0652] In addition, the invention further provides variants of the above variable heavy and light chains. In this case, the variable heavy chains can be 80%, 90%, 95%, 98% or 99% identical to the “VH” sequences herein, and/or contain from 1, 2, 3, 4, 5, 6, 7, 8, 9, 10 amino acid changes, or more, when Fc variants are used. Variable light chains are provided that can be 80%, 90%, 95%, 98% or 99% identical to the “V_{L}” sequences herein (and in particular CPA.9.086), and/or contain from 1, 2, 3, 4, 5, 6, 7, 8, 9, 10 amino acid changes, or more, when Fc variants are used. In these embodiments, the invention includes these variants as long as the antibody still binds to TIGIT. Suitable assays for testing whether an anti-TIGIT antibody that contains mutations as compared to the CDR sequences outlined herein are known in the art, such as Biacore assays.

[0653] Similarly, heavy and light chains are provided that are 80%, 90%, 95%, 98% or 99% identical to the full length “HC” and “LC” sequences herein (and in particular CPA.9.086), and/or contain from 1, 2, 3, 4, 5, 6, 7, 8, 9, 10 amino acid changes, or more, when Fc variants are used. In these embodiments, the invention includes these variants as long as the antibody still binds to TIGIT. Suitable assays for testing whether an anti-TIGIT antibody that contains mutations as compared to the CDR sequences outlined herein are known in the art, such as Biacore assays.

[0654] In addition, the framework regions of the variable heavy and variable light chains of either the CPA or CHA antibodies herein can be humanized (or, in the case of the CHA antibodies, “rehumanized”, to the extent that alternative humanization methods can be done) as is known in the art (with occasional variants generated in the CDRs as needed), and thus humanized variants of the VH and VL chains of FIG. 30 can be generated (and in particular CPA.9.086). Furthermore, the humanized variable heavy and light domains can then be fused with human constant regions, such as the constant regions from IgG1, IgG2, IgG3 and IgG4 (including IgG4(S241P)).

[0655] In particular, as is known in the art, murine VH and VL chains can be humanized as is known in the art, for example, using the IgBLAST program of the NCBI website, as outlined in Ye et al. Nucleic Acids Res. 41:W34-W40 (2013), herein incorporated by reference in its entirety for the humanization methods. IgBLAST takes a murine VH and/or VL sequence and compares it to a library of known human germline sequences. As shown herein, for the humanized sequences generated herein, the databases used were IMGT human VH genes (F+ORF, 273 germline sequences) and IMGT human V_{L} kappa genes (F+ORF, 74 germline sequences). An exemplary five CHA sequences were chosen: CHA.9.536, CHA9.560, CHA.9.546, CHA.9.547 and CHA.9.541 (see FIG. 30). For this embodiment of the humanization, human germline IGHV1-46(allele1) was chosen for all 5 as the acceptor sequence and the human heavy chain IGHJ4(allele1) joining region (J gene). For three of four (CHA.7.518, CHA.7.530, CHA.7.538_1 and CHA.7.538_2), human germline IGKV1-39(allele 1) was chosen as the acceptor sequence and human light chain IGKJ2(allele1) (J gene) was chosen. The J gene was chosen from human joining region sequences compiled at IMGT® the international ImMunoGeneTics information system as www.imgt.org. CDRs were defined according to the AbM definition (see www.bioinfo.org.uk/abs/).

[0656] In some embodiments, the anti-TIGIT antibodies of the present invention include anti-TIGIT antibodies wherein the V_{H} and V_{L} sequences of different anti-TIGIT antibodies can be “mixed and matched” to create other anti-TIGIT antibodies. TIGIT binding of such “mixed and matched” antibodies can be tested using the binding assays described above. e.g., ELISAs or Biacore assays). In some embodiments, when V_{H} and V_{L} chains are mixed and matched, a V_{H} sequence from a particular V_{H}/V_{L} pairing is replaced with a structurally similar V_{H} sequence. Likewise, in some embodiments, a V_{L} sequence from a particular V_{H}/V_{L} pairing is replaced with a structurally similar V_{L} sequence. For example, the V_{H} and V_{L} sequences of homologous antibodies are particularly amenable for mixing and matching.

[0657] Accordingly, the TIGIT antibodies of the invention comprise CDR amino acid sequences selected from the group consisting of (a) sequences as listed herein; (b) sequences that differ from those CDR amino acid sequences specified in (a) by 1, 2, 3, 4, 5, 6, 7, 8, 9, 10 or more amino acid substitutions; (c) amino acid sequences having 90% or greater, 95% or greater, 98% or greater, or 99% or greater sequence identity to the sequences specified in (a) or (b); (d) a polypeptide having an amino acid sequence encoded by a polynucleotide having a nucleic acid sequence encoding the amino acids as listed herein. In particular, the CPA.9.086 antibody can have sequences selected from (a), (b), (c) or (d).

[0658] Additionally included in the definition of TIGIT antibodies are antibodies that share identity to the TIGIT antibodies enumerated herein. That is, in certain embodiments, an anti-TIGIT antibody according to the invention comprises heavy and light chain variable regions comprising amino acid sequences that are identical to all or part of the anti-TIGIT amino acid sequences of preferred anti-TIGIT antibodies, respectively, wherein the antibodies retain the desired functional properties of the parent anti-TIGIT antibodies. The percent identity between the two sequences is a function of the number of identical positions shared by the sequences (i.e., % homology=#of identical positions/total #of positions×100), taking into account the number of gaps, and the length of each gap, which need to be introduced for optimal alignment of the two sequences. The comparison of sequences and determination of percent identity between two sequences can be accomplished using a mathematical algorithm, as described in the non-limiting examples below.

[0659] The percent identity between two amino acid sequences can be determined using the algorithm of E. Meyers and W. Miller (Comput. Appl. Biosci., 4:11-17 (1988)) which has been incorporated into the ALIGN program (version 2.0), using a PAM120 weight residue table, a gap length penalty of 12 and a gap penalty of 4. In addition, the percent identity between two amino acid sequences can be determined using the Needleman and Wunsch (J. Mol. Biol. 48:444-453 (1970)) algorithm which has been incorporated into the GAP program in the GCG software package (available commercially), using either a Blossum 62 matrix or a PAM250 matrix, and a gap weight of 16, 14, 12, 10, 8, 6, or 4 and a length weight of 1, 2, 3, 4, 5, or 6.

[0660] Additionally or alternatively, the protein sequences of the present invention can further be used as a “query sequence” to perform a search against public databases to, for example, identify related sequences. Such searches can be performed using the XBLAST program (version 2.0) of Altschul, et al. (1990) J Mol. Biol. 215:403-10. BLAST protein searches can be performed with the XBLAST program, score=50, wordlength=3 to obtain amino acid sequences homologous to the antibody molecules according to at least some embodiments of the invention. To obtain gapped alignments for comparison purposes, Gapped BLAST can be utilized as described in Altschul et al., (1997) Nucleic Acids Res. 25(17):3389-3402. When utilizing BLAST and Gapped BLAST programs, the default parameters of the respective programs (e.g., XBLAST and NBLAST) can be used.

[0661] In general, the percentage identity for comparison between TIGIT antibodies is at least 75%, at least 80%, at least 90%, with at least about 95, 96, 97, 98 or 99% percent identity being preferred. The percentage identity may be along the whole amino acid sequence, for example the entire heavy or light chain or along a portion of the chains. For example, included within the definition of the anti-TIGIT antibodies of the invention are those that share identity along the entire variable region (for example, where the identity is 95 or 98% identical along the variable regions), or along the entire constant region, or along just the Fc domain. In particular, the invention provides TIGIT antibodies that have at least 75%, at least 80%, at least 90%, with at least about 95, 96, 97, 98 or 99% percent identity being preferred, with the CPA.9.086 antibody.

[0662] In addition, also included are sequences that may have the identical CDRs but changes in the framework portions of the variable domain (or entire heavy or light chain). For example, TIGIT antibodies include those with CDRs identical to those shown in FIG. 30 but whose identity along the variable region can be lower, for example 95 or 98% percent identical. In particular, the invention provides TIGIT antibodies that have identical CDRs to CPA.9.086 but with framework regions that are 95 or 98% identical to CPA.9.086.

[0663] 1. TIGIT Antibodies that Compete for Binding

[0664] The present invention provides not only the enumerated antibodies but additional antibodies that compete with the enumerated antibodies (the CPA numbers enumerated herein that specifically bind to TIGIT) to specifically bind to the TIGIT molecule. As is shown in Example 16, the TIGIT antibodies of the invention “bin” into different epitope bins. Among the 44 TIGIT antibodies in the epitope binning study, there are four communities, each having related pairwise blocking patterns, which separate into 12 total discrete bins outlined herein and shown in FIGS. 67 and 68. There are twelve discrete bins outlined herein; 1) BM9-H4, CHA.9.525, CPA.9.081-H4, CHA.9.538, CHA.9.553, CPA.9.069-H4, CHA.9.543, CHA.9.556, CPA.9.077-H4 and CHA.9.561; 2) CHA.9.560 and CHA.9.528; 3) CHA.9.552, CHA.9.521, CHA.9.541, CHA.9.529, CHA.9.519, CHA.9.527 and CHA.9.549; 4) CPA.9.057-H4 and CHA.9.554; 5) CHA.9.546, CPA.9.012-H4, CHA.9.547, CPA.9.013-H4, CPA.9.018-H4, MBSA43-M1, Sino PVR-Fc(ligand), CHA.9.555, PVR-Fc M2A(ligand), BM29-H4, CPA.9.027-H4, CPA.9.049-H4 and CPA.9.053-H4; 6) CPA.9.064-H4; 7) BM26-H4; 8) CPA.9.059-H4; 9) CHA.9.535 and CPA.9.009-H4; 10) CHA.9.536, CHA.9.522 and CPA.9.015-H4; 11) CPA.9.011-H4 and BM8-H4 and 12) CPA.9.071-H4.

[0665] Thus, the invention provides anti-TIGIT antibodies that compete for binding with antibodies that are in discrete epitope bins 1 to 12. In a particular embodiment, the invention provides anti-TIGIT antibodies that compete for binding with CPA.9.086 and are at least 95, 96, 97, 98, or 99% identical to CPA.9.086.

[0666] Additional antibodies that compete with the enumerated antibodies are generated, as is known in the art and generally outlined below. Competitive binding studies can be done as is known in the art, generally using SPR/Biacore® binding assays, as well as ELISA and cell-based assays.

[0667] E. Optional Antibody Engineering

[0668] The anti-PVRIG antibodies (e.g., anti-PVRIG antibodies including those with CDRs identical to those shown in FIG. 3) of the invention can be modified, or engineered, to alter the amino acid sequences by amino acid substitutions.

[0669] By “amino acid substitution” or “substitution” herein is meant the replacement of an amino acid at a particular position in a parent polypeptide sequence with a different amino acid. In particular, in some embodiments, the substitution is to an amino acid that is not naturally occurring at the particular position, either not naturally occurring within the organism or in any organism. For example, the substitution E272Y refers to a variant polypeptide, in this case an Fc variant, in which the glutamic acid at position 272 is replaced with tyrosine. For clarity, a protein which has been engineered to change the nucleic acid coding sequence but not change the starting amino acid (for example exchanging CGG (encoding arginine) to CGA (still encoding arginine) to increase host organism expression levels) is not an “amino acid substitution”; that is, despite the creation of a new gene encoding the same protein, if the protein has the same amino acid at the particular position that it started with, it is not an amino acid substitution.

[0670] As discussed herein, amino acid substitutions can be made to alter the affinity of the CDRs for the PVRIG protein (including both increasing and decreasing binding, as is more fully outlined below), as well as to alter additional functional properties of the antibodies. For example, the antibodies may be engineered to include modifications within the Fc region, typically to alter one or more functional properties of the antibody, such as serum half-life, complement fixation, Fc receptor binding, and/or antigen-dependent cellular cytotoxicity. Furthermore, an antibody according to at least some embodiments of the invention may be chemically modified (e.g., one or more chemical moieties can be attached to the antibody) or be modified to alter its glycosylation, again to alter one or more functional properties of the antibody. Such embodiments are described further below. The numbering of residues in the Fc region is that of the EU index of Kabat.

[0671] In one embodiment, the hinge region of C_{H1} is modified such that the number of cysteine residues in the hinge region is altered, e.g., increased or decreased. This approach is described further in U.S. Pat. No. 5,677,425 by Bodmer et al. The number of cysteine residues in the hinge region of CH1 is altered to, for example, facilitate assembly of the light and heavy chains or to increase or decrease the stability of the antibody.

[0672] In another embodiment, the Fc hinge region of an antibody is mutated to decrease the biological half-life of the antibody. More specifically, one or more amino acid mutations are introduced into the CH2-CH3 domain interface region of the Fc-hinge fragment such that the antibody has impaired Staphylococcyl protein A (SpA) binding relative to native Fc-hinge domain SpA binding. This approach is described in further detail in U.S. Pat. No. 6,165,745 by Ward et al.

[0673] In some embodiments, amino acid substitutions can be made in the Fc region, in general for altering binding to FcγR receptors. By “Fc gamma receptor”, “FcγR” or “FcgammaR” as used herein is meant any member of the family of proteins that bind the IgG antibody Fc region and is encoded by an FcγR gene. In humans this family includes but is not limited to FcγRI (CD64), including isoforms FcγRIa, FcγRIb, and FcγRIc; FcγRII (CD32), including isoforms FcγRIIa (including allotypes H131 and R131), FcγRIIb (including FcγRIIb-1 and FcγRIIb-2), and FcγRIIc; and FcγRIII (CD16), including isoforms FcγRIIIa (including allotypes V158 and F158) and FcγRIIIb (including allotypes FcγRIIIb-NA1 and FcγRIIIb-NA2) (Jefferis et al., 2002, Immunol Lett 82:57-65, entirely incorporated by reference), as well as any undiscovered human FcγRs or FcγR isoforms or allotypes. An FcγR may be from any organism, including but not limited to humans, mice, rats, rabbits, and monkeys. Mouse FcγRs include but are not limited to FcγRI (CD64), FcγRII (CD32), FcγRIII-1 (CD16), and FcγRIII-2 (CD16-2), as well as any undiscovered mouse FcγRs or FcγR isoforms or allotypes.

[0674] There are a number of useful Fc substitutions that can be made to alter binding to one or more of the FcγR receptors. Substitutions that result in increased binding as well as decreased binding can be useful. For example, it is known that increased binding to FcγRIIIa generally results in increased ADCC (antibody dependent cell-mediated cytotoxicity; the cell-mediated reaction wherein nonspecific cytotoxic cells that express FcγRs recognize bound antibody on a target cell and subsequently cause lysis of the target cell. Similarly, decreased binding to FcγRIIb (an inhibitory receptor) can be beneficial as well in some circumstances. Amino acid substitutions that find use in the present invention include those listed in U.S. Ser. Nos. 11/124,620 (particularly FIG. 41) and U.S. Pat. No. 6,737,056, both of which are expressly incorporated herein by reference in their entirety and specifically for the variants disclosed therein. Particular variants that find use include, but are not limited to, 236A, 239D, 239E, 332E, 332D, 239D/332E, 267D, 267E, 328F, 267E/328F, 236A/332E, 239D/332E/330Y, 239D, 332E/330L, 299T and 297N.

[0675] In addition, the antibodies of the invention are modified to increase its biological half-life. Various approaches are possible. For example, one or more of the following mutations can be introduced: T252L, T254S, T256F, as described in U.S. Pat. No. 6,277,375 to Ward. Alternatively, to increase the biological half-life, the antibody can be altered within the C_{H1} or CL region to contain a salvage receptor binding epitope taken from two loops of a CH2 domain of an Fc region of an IgG, as described in U.S. Pat. Nos. 5,869,046 and 6,121,022 by Presta et al. Additional mutations to increase serum half-life are disclosed in U.S. Pat. Nos. 8,883,973, 6,737,056 and 7,371,826, and include 428L, 434A, 434S, and 428L/434S.

[0676] In yet other embodiments, the Fc region is altered by replacing at least one amino acid residue with a different amino acid residue to alter the effector functions of the antibody. For example, one or more amino acids selected from amino acid residues 234, 235, 236, 237, 297, 318, 320 and 322 can be replaced with a different amino acid residue such that the antibody has an altered affinity for an effector ligand but retains the antigen-binding ability of the parent antibody. The effector ligand to which affinity is altered can be, for example, an Fc receptor or the C1 component of complement. This approach is described in further detail in U.S. Pat. Nos. 5,624,821 and 5,648,260, both by Winter et al.

[0677] In another example, one or more amino acids selected from amino acid residues 329, 331 and 322 can be replaced with a different amino acid residue such that the antibody has altered C1q binding and/or reduced or abolished complement dependent cytotoxicity (CDC). This approach is described in further detail in U.S. Pat. No. 6,194,551 by Idusogie et al.

[0678] In another example, one or more amino acid residues within amino acid positions 231 and 239 are altered to thereby alter the ability of the antibody to fix complement. This approach is described further in PCT Publication WO 94/29351 by Bodmer et al.

[0679] In yet another example, the Fc region is modified to increase the ability of the antibody to mediate antibody dependent cellular cytotoxicity (ADCC) and/or to increase the affinity of the antibody for an Fc [symbol] receptor by modifying one or more amino acids at the following positions: 238, 239, 248, 249, 252, 254, 255, 256, 258, 265, 267, 268, 269, 270, 272, 276, 278, 280, 283, 285, 286, 289, 290, 292, 293, 294, 295, 296, 298, 301, 303, 305, 307, 309, 312, 315, 320, 322, 324, 326, 327, 329, 330, 331, 333, 334, 335, 337, 338, 340, 360, 373, 376, 378, 382, 388, 389, 398, 414, 416, 419, 430, 434, 435, 437, 438 or 439. This approach is described further in PCT Publication WO 00/42072 by Presta. Moreover, the binding sites on human IgG1 for Fc [symbol] RI, Fc [symbol] RII, Fc [symbol] RIII and FcRn have been mapped and variants with improved binding have been described (see Shields, R. L. et al. (2001) J. Biol. Chem. 276:6591-6604). Specific mutations at positions 256, 290, 298, 333, 334 and 339 are shown to improve binding to FcyRIII. Additionally, the following combination mutants are shown to improve Fc [symbol] RIII binding: T256A/S298A, S298A/E333A, S298A/K224A and S298A/E333A/K334A. Furthermore, mutations such as M252Y/S254T/T256E or M428L/N434S improve binding to FcRn and increase antibody circulation half-life (see Chan C A and Carter P J (2010) Nature Rev Immunol 10:301-316).

[0680] In still another embodiment, the antibody can be modified to abrogate in vivo Fab arm exchange. Specifically, this process involves the exchange of IgG4 half-molecules (one heavy chain plus one light chain) between other IgG4 antibodies that effectively results in bispecific antibodies which are functionally monovalent. Mutations to the hinge region and constant domains of the heavy chain can abrogate this exchange (see, Aalberse, R C, Schuurman J., 2002, Immunology 105:9-19).

[0681] In still another embodiment, the glycosylation of an antibody is modified. For example, an aglycosylated antibody can be made (i.e., the antibody lacks glycosylation). Glycosylation can be altered to, for example, increase the affinity of the antibody for antigen or reduce effector function such as ADCC. Such carbohydrate modifications can be accomplished by, for example, altering one or more sites of glycosylation within the antibody sequence, for example N297. For example, one or more amino acid substitutions can be made that result in elimination of one or more variable region framework glycosylation sites to thereby eliminate glycosylation at that site.

[0682] Additionally or alternatively, an antibody can be made that has an altered type of glycosylation, such as a hypofucosylated antibody having reduced amounts of fucosyl residues or an antibody having increased bisecting GlcNac structures. Such altered glycosylation patterns have been demonstrated to increase the ADCC ability of antibodies. Such carbohydrate modifications can be accomplished by, for example, expressing the antibody in a host cell with altered glycosylation machinery. Cells with altered glycosylation machinery have been described in the art and can be used as host cells in which to express recombinant antibodies according to at least some embodiments of the invention to thereby produce an antibody with altered glycosylation. For example, the cell lines Ms704, Ms705, and Ms709 lack the fucosyltransferase gene, FUT8 (α (1,6) fucosyltransferase), such that antibodies expressed in the Ms704, Ms705, and Ms709 cell lines lack fucose on their carbohydrates. The Ms704, Ms705, and Ms709 FUT8 cell lines are created by the targeted disruption of the FUT8 gene in CHO/DG44 cells using two replacement vectors (see U.S. Patent Publication No. 20040110704 by Yamane et al. and Yamane-Ohnuki et al. (2004) Biotechnol Bioeng 87:614-22). As another example, EP 1,176,195 by Hanai et al. describes a cell line with a functionally disrupted FUT8 gene, which encodes a fucosyl transferase, such that antibodies expressed in such a cell line exhibit hypofucosylation by reducing or eliminating the a 1,6 bond-related enzyme. Hanai et al. also describe cell lines which have a low enzyme activity for adding fucose to the N-acetylglucosamine that binds to the Fc region of the antibody or does not have the enzyme activity, for example the rat myeloma cell line YB2/0 (ATCC CRL 1662). PCT Publication WO 03/035835 by Presta describes a variant CHO cell line, Lec13 cells, with reduced ability to attach fucose to Asn(297)-linked carbohydrates, also resulting in hypofucosylation of antibodies expressed in that host cell (see also Shields, R. L. et al. (2002) J. Biol. Chem. 277:26733-26740). PCT Publication WO 99/54342 by Umana et al. describes cell lines engineered to express glycoprotein-modifying glycosyl transferases (e.g., β(1,4)-N-acetylglucosaminyltransferase III (GnTIII)) such that antibodies expressed in the engineered cell lines exhibit increased bisecting GlcNac structures which results in increased ADCC activity of the antibodies (see also Umana et al. (1999) Nat. Biotech. 17:176-180). Alternatively, the fucose residues of the antibody may be cleaved off using a fucosidase enzyme. For example, the fucosidase α-L-fucosidase removes fucosyl residues from antibodies (Tarentino, A. L. et al. (1975) Biochem. 14:5516-23).

[0683] Another modification of the antibodies herein that is contemplated by the invention is pegylation or the addition of other water soluble moieties, typically polymers, e.g., in order to enhance half-life. An antibody can be pegylated to, for example, increase the biological (e.g., serum) half-life of the antibody. To pegylate an antibody, the antibody, or fragment thereof, typically is reacted with polyethylene glycol (PEG), such as a reactive ester or aldehyde derivative of PEG, under conditions in which one or more PEG groups become attached to the antibody or antibody fragment. Preferably, the pegylation is carried out via an acylation reaction or an alkylation reaction with a reactive PEG molecule (or an analogous reactive water-soluble polymer). As used herein, the term “polyethylene glycol” is intended to encompass any of the forms of PEG that have been used to derivatize other proteins, such as mono (C₁-C₁₀) alkoxy- or aryloxy-polyethylene glycol or polyethylene glycol-maleimide. In certain embodiments, the antibody to be pegylated is an aglycosylated antibody. Methods for pegylating proteins are known in the art and can be applied to the antibodies according to at least some embodiments of the invention. See for example, EP 0 154 316 by Nishimura et al. and EP 0 401 384 by Ishikawa et al.

[0684] In addition to substitutions made to alter binding affinity to FcγRs and/or FcRn and/or increase in vivo serum half-life, additional antibody modifications can be made, as described in further detail below.

[0685] In some cases, affinity maturation is done. Amino acid modifications in the CDRs are sometimes referred to as “affinity maturation”. An “affinity matured” antibody is one having one or more alteration(s) in one or more CDRs which results in an improvement in the affinity of the antibody for antigen, compared to a parent antibody which does not possess those alteration(s). In some cases, although rare, it may be desirable to decrease the affinity of an antibody to its antigen, but this is generally not preferred.

[0686] In some embodiments, one or more amino acid modifications are made in one or more of the CDRs of the PVRIG antibodies of the invention. In general, only 1 or 2 or 3-amino acids are substituted in any single CDR, and generally no more than from 1, 2, 3. 4, 5, 6, 7, 8 9 or 10 changes are made within a set of CDRs. However, it should be appreciated that any combination of no substitutions, 1, 2 or 3 substitutions in any CDR can be independently and optionally combined with any other substitution.

[0687] Affinity maturation can be done to increase the binding affinity of the antibody for the PVRIG antigen by at least about 10% to 50-100-150% or more, or from 1 to 5 fold as compared to the “parent” antibody. Preferred affinity matured antibodies will have nanomolar or even picomolar affinities for the PVRIG antigen. Affinity matured antibodies are produced by known procedures. See, for example, Marks et al., 1992, Biotechnology 10:779-783 that describes affinity maturation by variable heavy chain (VH) and variable light chain (VL) domain shuffling. Random mutagenesis of CDR and/or framework residues is described in: Barbas, et al. 1994, Proc. Nat. Acad. Sci, USA 91:3809-3813; Shier et al., 1995, Gene 169:147-155; Yelton et al., 1995, J. Immunol. 155:1994-2004; Jackson et al., 1995, J. Immunol. 154(7):3310-9; and Hawkins et al, 1992, J. Mol. Biol. 226:889-896, for example.

[0688] Alternatively, amino acid modifications can be made in one or more of the CDRs of the antibodies of the invention that are “silent”, e.g., that do not significantly alter the affinity of the antibody for the antigen. These can be made for a number of reasons, including optimizing expression (as can be done for the nucleic acids encoding the antibodies of the invention).

[0689] Thus, included within the definition of the CDRs and antibodies of the invention are variant CDRs and antibodies; that is, the antibodies of the invention can include amino acid modifications in one or more of the CDRs of the enumerated antibodies of the invention. In addition, as outlined below, amino acid modifications can also independently and optionally be made in any region outside the CDRs, including framework and constant regions.

### V. PVRIG Treatment Antibodies

[0690] The present invention provides anti-PVRIG antibodies for treatments purposes and uses. (For convenience, “anti-PVRIG antibodies” and “PVRIG antibodies” are used interchangeably). The anti-PVRIG antibodies of the invention specifically bind to human PVRIG, and preferably the ECD of human PVRIG, as depicted in FIG. 3, including, e.g., anti-PVRIG antibodies including those with CDRs identical to those shown in FIG. 3.

[0691] Specific binding for PVRIG or a PVRIG epitope can be exhibited, for example, by an antibody having a KD of at least about 10⁻⁴ M, at least about 10⁻⁵ M, at least about 10⁻⁶ M, at least about 10⁻⁷ M, at least about 10⁻⁸ M, at least about 10⁻⁹ M, alternatively at least about 10⁻¹⁰ M, at least about 10⁻¹¹ M, at least about 10⁻¹² M, or greater, where KD refers to a dissociation rate of a particular antibody-antigen interaction. Typically, an antibody that specifically binds an antigen will have a KD that is 20-, 50-, 100-, 500-, 1000-, 5,000-, 10,000- or more times greater for a control molecule relative to the PVRIG antigen or epitope.

[0692] However, as shown in the Examples, for optimal binding to PVRIG expressed on the surface of NK and T-cells, the antibodies preferably have a KD less 50 nM and most preferably less than 1 nM, with less than 0.1 nM and less than 1 pM and 0.1 pM finding use in the methods of the invention.

[0693] Also, specific binding for a particular antigen or an epitope can be exhibited, for example, by an antibody having a KA or Ka for a PVRIG antigen or epitope of at least 20-, 50-, 100-, 500-, 1000-, 5,000-, 10,000- or more times greater for the epitope relative to a control, where KA or Ka refers to an association rate of a particular antibody-antigen interaction. s

[0694] In some embodiments, the anti-PVRIG antibodies of the invention bind to human PVRIG with a K_{D} of 100 nM or less, 50 nM or less, 10 nM or less, or 1 nM or less (that is, higher binding affinity), or 1 pM or less, wherein K_{D} is determined by known methods, e.g., surface plasmon resonance (SPR, e.g., Biacore assays), ELISA, KINEXA, and most typically SPR at 25° or 37° C.

[0695] The invention provides antigen binding domains, including full length antibodies, which contain a number of specific, enumerated sets of 6 CDRs, as provided in FIG. 3. The invention provides antigen binding domains, including full length antibodies, which contain a number of specific, enumerated sets of 6 CDRs, as provided in FIG. 3.

[0696] The invention further provides variable heavy and light domains as well as full length heavy and light chains.

[0697] As discussed herein, the invention further provides variants of the above components, including variants in the CDRs, as outlined above. In addition, variable heavy chains can be at least 80%, at least 90%, at least 95%, at least 98% or at least 99% identical to the “VH” sequences herein, and/or contain from 1, 2, 3, 4, 5, 6, 7, 8, 9, 10 amino acid changes, or more, when Fc variants are used. Variable light chains are provided that can be at least 80%, at least 90%, at least 95%, at least 98% or at least 99% identical to the “VL” sequences herein, and/or contain from 1, 2, 3, 4, 5, 6, 7, 8, 9, 10 amino acid changes, or more, when Fc variants are used. Similarly, heavy and light chains are provided that are at least 80%, at least 90%, at least 95%, at least 98% or at least 99% identical to the “HC” and “LC” sequences herein, and/or contain from 1, 2, 3, 4, 5, 6, 7, 8, 9, 10 amino acid changes, or more, when Fc variants are used.

[0698] Accordingly, the present invention provides antibodies, usually full length or scFv domains, that comprise the following CHA sets of CDRs, the sequences of which are shown in FIG. 3:
[0699] CHA.7.518.1.H4(S241P)vhCDR1, CHA.7.518.1.H4(S241P)vhCDR2,
[0700] CHA.7.518.1.H4(S241P)vhCDR3, CHA.7.518.1.H4(S241P)vlCDR1,
[0701] CHA.7.518.1.H4(S241P)vlCDR2, and CHA.7.518.1.H4(S241P)vlCDR3.

[0702] In addition, the framework regions of the variable heavy and variable light chains can be humanized as is known in the art (with occasional variants generated in the CDRs as needed), and thus humanized variants of the VH and VL chains of FIG. 3 can be generated. Furthermore, the humanized variable heavy and light domains can then be fused with human constant regions, such as the constant regions from IgG1, IgG2, IgG3 and IgG4.

[0703] In addition, also included are sequences that may have the identical CDRs but changes in the variable domain (or entire heavy or light chain). For example, PVRIG antibodies include those with CDRs identical to those shown in FIG. 3 or FIGS. 5A-5D but whose identity along the variable region can be lower, for example 95 or 98% percent identical. For example, PVRIG antibodies include those with CDRs identical to those shown in FIG. 3 but whose identity along the variable region can be lower, for example 95 or 98% percent identical, and in some embodiments at least 95% or at least 98%.

[0704] The percent identity between two amino acid sequences can be determined using the algorithm of E. Meyers and W. Miller (Comput. Appl. Biosci., 4:11-17 (1988)) which has been incorporated into the ALIGN program (version 2.0), using a PAM120 weight residue table, a gap length penalty of 12 and a gap penalty of 4. In addition, the percent identity between two amino acid sequences can be determined using the Needleman and Wunsch (J. Mol. Biol. 48:444-453 (1970)) algorithm which has been incorporated into the GAP program in the GCG software package (available commercially), using either a Blossum 62 matrix or a PAM250 matrix, and a gap weight of 16, 14, 12, 10, 8, 6, or 4 and a length weight of 1, 2, 3, 4, 5, or 6.

[0705] Additionally or alternatively, the protein sequences of the present invention can further be used as a “query sequence” to perform a search against public databases to, for example, identify related sequences. Such searches can be performed using the XBLAST program (version 2.0) of Altschul, et al. (1990) J Mol. Biol. 215:403-10. BLAST protein searches can be performed with the XBLAST program, score=50, wordlength=3 to obtain amino acid sequences homologous to the antibody molecules according to at least some embodiments of the invention. To obtain gapped alignments for comparison purposes, Gapped BLAST can be utilized as described in Altschul et al., (1997) Nucleic Acids Res. 25(17):3389-3402. When utilizing BLAST and Gapped BLAST programs, the default parameters of the respective programs (e.g., XBLAST and NBLAST) can be used.

[0706] In general, the percentage identity for comparison between PVRIG antibodies is at least 75%, at least 80%, at least 90%, with at least about 95, 96, 97, 98 or 99% percent identity being preferred. The percentage identity may be along the whole amino acid sequence, for example the entire heavy or light chain or along a portion of the chains. For example, included within the definition of the anti-PVRIG antibodies of the invention are those that share identity along the entire variable region (for example, where the identity is 95 or 98% identical along the variable regions, and in some embodiments at least 95% or at least 98%), or along the entire constant region, or along just the Fc domain.

### VI. Biomarkers and/or Companion Diagnostic

[0707] A. PVRL2

[0708] In some embodiments, the level of PVRL2 expression can be employed as a biomarker or companion diagnostic for use in determining treatment regimens as well as predicting or determining treatment efficacy. In some embodiments, the level of PVRL2 expression can be employed as a biomarker or companion diagnostic for use in the determining treatment regimens as well as predicting or determining treatment efficacy for treatment with an anti-PVRIG antibody. In some embodiments, the PVRL2 status is defined based on the percentage staining for all tumor infiltrating immune cells. In some embodiments, the expression is categorized based on expression staining criteria below, in Table 1.

TABLE 1
PVRL2 Staining Criteria

| PVRL2 status | Staining criteria | Predicted response |
|---|---|---|
| negative | 0% membrane | No to minimal |
| Tumor | >20% tumor membrane | likely |
| Positivity (TS) | staining at +1 IHC score | |
| Immune | >20% immune infiltrating | likely |
| Positivity (IS) | cells at any intensity | |
| | membrane or cytoplasmatic | |
| Endothelial | >20% endothelial cells at | likely |
| Positivity (ES) | any intensity membrane or | |
| | cytoplasmatic | |
| Total | Any combination of two | Very likely |
| Positive (ToP = | Positivity scores | |
| TS + IS + ES) | | |

[0709] In some embodiments, the level of PVRL2 expression is determined by measuring the level of PVRL2 using immunohistochemistry. In some embodiments, the level of PVRL2 expression, including the level of PVRL2 expression, is scored by a board-certified pathologist.

[0710] In some embodiments, the PVRL2 expression level is determined using immunohistochemistry. In some embodiments, the PVRIG expression level is determined using immunohistochemistry.

[0711] In some embodiments, the PVRL2 antibody used for the immunohistochemistry is CST PVRL2 Ab (Nectin-2/CD112 (D8D3F) XP® Rabbit mAb). (See, the World Wide Web at www.cellsignal.com/products/primary-antibodies/nectin-2-cd112-d8d3f-xp-rabbit-mab/95333.)

[0712] In some embodiments, the PVRL2 expression level is categorized as strong, moderate, weak, or negative.

[0713] In some embodiments, the PVRL2 expression is categorized as strong or moderate. In some embodiments, when PVRL2 expression is categorized as strong or moderate, there is predicted to be a response to an anti-PVRIG antibody. In some embodiments, the anti-PVRIG antibody comprises the antibody sequence in FIG. 3, including for example, CHA.7.518.1.H4(S241P)vhCDR1, CHA.7.518.1.H4(S241P)vhCDR2, CHA.7.518.1.H4(S241P)vhCDR3, CHA.7.518.1.H4(S241P)vlCDR1, CHA.7.518.1.H4(S241P)vlCDR2, and CHA.7.518.1.H4(S241P)vlCDR3.

[0714] In some embodiments, the PVRL2 expression level is categorized as 0—no signal, 1—low, 2—medium, or 3—high.

[0715] In some embodiments, the PVRL2 expression is categorized as 2—medium or 3—high. In some embodiments, when PVRL2 expression is categorized as 2—medium or 3—high, there is predicted to be a response to an anti-PVRIG antibody. In some embodiments, when PVRL2 expression is categorized as 3—high, there is predicted to be an increased likelihood of response to an anti-PVRIG antibody. In some embodiments, the anti-PVRIG antibody comprises the antibody sequence in FIG. 3, including for example, CHA.7.518.1.H4(S241P)vhCDR1, CHA.7.518.1.H4(S241P)vhCDR2, CHA.7.518.1.H4(S241P)vhCDR3, CHA.7.518.1.H4(S241P)vlCDR1, CHA.7.518.1.H4(S241P)vlCDR2, and CHA.7.518.1.H4(S241P)vlCDR3.

[0716] In some embodiments, the PVRL2 expression is 0% membrane staining there is predicted to be no response or a minimal response to an anti-PVRIG antibody. In some embodiments, the anti-PVRIG antibody comprises the antibody sequence in FIG. 3, including for example, CHA.7.518.1.H4(S241P)vhCDR1, CHA.7.518.1.H4(S241P)vhCDR2, CHA.7.518.1.H4(S241P)vhCDR3, CHA.7.518.1.H4(S241P)vlCDR1, CHA.7.518.1.H4(S241P)vlCDR2, and CHA.7.518.1.H4(S241P)vlCDR3.

[0717] In some embodiments, the PVRL2 expression is >20% tumor membrane staining at +1 IHC score there is predicted to be a response to an anti-PVRIG antibody. In some embodiments, the anti-PVRIG antibody comprises the antibody sequence in FIG. 3, including for example, CHA.7.518.1.H4(S241P)vhCDR1, CHA.7.518.1.H4(S241P)vhCDR2, CHA.7.518.1.H4(S241P)vhCDR3, CHA.7.518.1.H4(S241P)vlCDR1, CHA.7.518.1.H4(S241P)vlCDR2, and CHA.7.518.1.H4(S241P)vlCDR3.

[0718] In some embodiments, the PVRL2 expression is >20% tumor membrane staining at +1 IHC score there is predicted to be a response to an anti-PVRIG antibody. In some embodiments, the anti-PVRIG antibody comprises the antibody sequence in FIG. 3, including for example, CHA.7.518.1.H4(S241P)vhCDR1, CHA.7.518.1.H4(S241P)vhCDR2, CHA.7.518.1.H4(S241P)vhCDR3, CHA.7.518.1.H4(S241P)vlCDR1, CHA.7.518.1.H4(S241P)vlCDR2, and CHA.7.518.1.H4(S241P)vlCDR3.

[0719] In some embodiments, the PVRL2 expression is >20% immune infiltrating cells at any intensity membrane or cytoplasmatic staining there is predicted to be a response to an anti-PVRIG antibody. In some embodiments, the anti-PVRIG antibody comprises the antibody sequence in FIG. 3, including for example, CHA.7.518.1.H4(S241P)vhCDR1, CHA.7.518.1.H4(S241P)vhCDR2, CHA.7.518.1.H4(S241P)vhCDR3, CHA.7.518.1.H4(S241P)vlCDR1, CHA.7.518.1.H4(S241P)vlCDR2, and CHA.7.518.1.H4(S241P)vlCDR3.

[0720] In some embodiments, there is an increased prediction of a response to an anti-PVRIG antibody when the PVRL2 expression is characterized by at least two of the following:
[0721] >20% tumor membrane staining at +1 IHC score there is predicted to be no response or a minimal response to an anti-PVRIG antibody,
[0722] >20% tumor membrane staining at +1 IHC score there is predicted to be a response to an anti-PVRIG antibody, and/or
[0723] >20% immune infiltrating cells at any intensity membrane or cytoplasmatic staining.

[0724] In some embodiments, there is an increased prediction of a response to the anti-PVRIG antibody comprising the antibody sequence in FIG. 3, including for example, CHA.7.518.1.H4(S241P)vhCDR1, CHA.7.518.1.H4(S241P)vhCDR2, CHA.7.518.1.H4(S241P)vhCDR3, CHA.7.518.1.H4(S241P)vlCDR1, CHA.7.518.1.H4(S241P)vlCDR2, and CHA.7.518.1.H4(S241P)vlCDR3, when the PVRL2 expression is characterized by at least two of the following:
[0725] 20% tumor membrane staining at +1 IHC score there is predicted to be no response or a minimal response to an anti-PVRIG antibody,
[0726] 20% tumor membrane staining at +1 IHC score there is predicted to be a response to an anti-PVRIG antibody, and/or
[0727] 20% immune infiltrating cells at any intensity membrane or cytoplasmatic staining.

[0728] In some embodiments, cancer patients having dendritic cells in the tumor, tumor microenvironment, and/or peripheral blood with at least 10%, 20%, 30%, 40%, 50%, 60%, 70%, 80%, or 90% PVRL2 expression had a higher probability to respond an anti-PVRIG antibody treatment as compared to cancer patient with lower PVRL2 expression. In some embodiments, the anti-PVRIG antibody comprises the antibody sequence in FIG. 3, including for example, CHA.7.518.1.H4(S241P)vhCDR1, CHA.7.518.1.H4(S241P)vhCDR2, CHA.7.518.1.H4(S241P)vhCDR3, CHA.7.518.1.H4(S241P)vlCDR1, CHA.7.518.1.H4(S241P)vlCDR2, and CHA.7.518.1.H4(S241P)vlCDR3.

[0729] In some embodiments, cancer patients having activated dendritic cells in the tumor, tumor microenvironment, and/or peripheral blood, with at least 10%, 20%, 30%, 40%, 50%, 60%, 70%, 80%, or 90% PVRL2 expression had a higher probability to respond an anti-PVRIG antibody treatment as compared to cancer patient with lower PVRL2 expression. In some embodiments, the anti-PVRIG antibody comprises the antibody sequence in FIG. 3, including for example, CHA.7.518.1.H4(S241P)vhCDR1, CHA.7.518.1.H4(S241P)vhCDR2, CHA.7.518.1.H4(S241P)vhCDR3, CHA.7.518.1.H4(S241P)vlCDR1, CHA.7.518.1.H4(S241P)vlCDR2, and CHA.7.518.1.H4(S241P)vlCDR3.

[0730] In some embodiments, cancer patients having DC1 in the tumor, tumor microenvironment, and/or peripheral blood, with at least 5%, 10% 20%, 30%, 40%, 50%, 60%, 70%, 80%, or 90% PVRL2 expression had a higher probability to respond an anti-PVRIG antibody treatment as compared to cancer patient with lower PVRL2 expression. In some embodiments, the anti-PVRIG antibody comprises the antibody sequence in FIG. 3, including for example, CHA.7.518.1.H4(S241P)vhCDR1, CHA.7.518.1.H4(S241P)vhCDR2, CHA.7.518.1.H4(S241P)vhCDR3, CHA.7.518.1.H4(S241P)vlCDR1, CHA.7.518.1.H4(S241P)vlCDR2, and CHA.7.518.1.H4(S241P)vlCDR3.

[0731] In some embodiments, cancer patients having immune cells in the tumor, tumor microenvironment, and/or peripheral blood with at least 10%, 20%, 30%, 40%, 50%, 60%, 70%, 80%, or 90% PVRL2 expression had a higher probability to respond to an anti-PVRIG antibody treatment as compared to a cancer patient with lower PVRL2 expression. In some embodiments, the anti-PVRIG antibody comprises the antibody sequence in FIG. 3, including for example, CHA.7.518.1.H4(S241P)vhCDR1, CHA.7.518.1.H4(S241P)vhCDR2, CHA.7.518.1.H4(S241P)vhCDR3, CHA.7.518.1.H4(S241P)vlCDR1, CHA.7.518.1.H4(S241P)vlCDR2, and CHA.7.518.1.H4(S241P)vlCDR3.

[0732] In some embodiments, cancer patients having NK cells, NKT cells, gamma-delta T cells, T cells, CD4 positive T cells, and/or CD8 positive T cells, in the tumor, tumor microenvironment, and/or peripheral blood with at least 10%, 20%, 30%, 40%, 50%, 60%, 70%, 80%, or 90% PVRL2 expression had a higher probability to respond to an anti-PVRIG antibody treatment as compared to a cancer patient with lower PVRL2 expression. In some embodiments, the anti-PVRIG antibody comprises the antibody sequence in FIG. 3, including for example, CHA.7.518.1.H4(S241P)vhCDR1, CHA.7.518.1.H4(S241P)vhCDR2, CHA.7.518.1.H4(S241P)vhCDR3, CHA.7.518.1.H4(S241P)vlCDR1, CHA.7.518.1.H4(S241P)vlCDR2, and CHA.7.518.1.H4(S241P)vlCDR3.

[0733] In some embodiments, cancer patients having CD4 positive T cells and/or CD8 positive T cells, in the tumor, tumor microenvironment, and/or peripheral blood with at least 10%, 20%, 30%, 40%, 50%, 60%, 70%, 80%, or 90% PVRL2 expression had a higher probability to respond to an anti-PVRIG antibody treatment as compared to cancer patient with lower PVRL2 expression. In some embodiments, the anti-PVRIG antibody comprises the antibody sequence in FIG. 3, including for example, CHA.7.518.1.H4(S241P)vhCDR1, CHA.7.518.1.H4(S241P)vhCDR2, CHA.7.518.1.H4(S241P)vhCDR3, CHA.7.518.1.H4(S241P)vlCDR1, CHA.7.518.1.H4(S241P)vlCDR2, and CHA.7.518.1.H4(S241P)vlCDR3.

[0734] In some embodiments, cancer patients having TSCM, TRM, naïve, exhausted, cycling, memory, and/or effector CD8 and/or CD4 positive T cells in the tumor, tumor microenvironment, and/or peripheral blood with at least 10%, 20%, 30%, 40%, 50%, 60%, 70%, 80%, or 90% PVRL2 expression had a higher probability to respond to an anti-PVRIG antibody treatment as compared to a cancer patient with lower PVRL2 expression. In some embodiments, the anti-PVRIG antibody comprises the antibody sequence in FIG. 3, including for example, CHA.7.518.1.H4(S241P)vhCDR1, CHA.7.518.1.H4(S241P)vhCDR2, CHA.7.518.1.H4(S241P)vhCDR3, CHA.7.518.1.H4(S241P)vlCDR1, CHA.7.518.1.H4(S241P)v1CDR2, and CHA.7.518.1.H4(S241P)vlCDR3.

[0735] In some embodiments, cancer patients having dendritic cells in the tumor, tumor microenvironment, and/or peripheral blood with at least 10%, 20%, 30%, 40%, 50%, 60%, 70%, 80%, or 90% PVRL2 expression had a higher probability to respond to an anti-PVRIG antibody treatment as compared to a cancer patient with lower PVRL2 expression. In some embodiments, the anti-PVRIG antibody comprises the antibody sequence in FIG. 3, including for example, CHA.7.518.1.H4(S241P)vhCDR1, CHA.7.518.1.H4(S241P)vhCDR2, CHA.7.518.1.H4(S241P)vhCDR3, CHA.7.518.1.H4(S241P)vlCDR1, CHA.7.518.1.H4(S241P)vlCDR2, and CHA.7.518.1.H4(S241P)vlCDR3.

[0736] In some embodiments, cancer patients having activated dendritic cells in the tumor, tumor microenvironment, and/or peripheral blood, with at least 10%, 20%, 30%, 40%, 50%, 60%, 70%, 80%, or 90% PVRL2 expression had a higher probability to respond to an anti-PVRIG antibody treatment as compared to a cancer patient with lower PVRL2 expression. In some embodiments, the anti-PVRIG antibody comprises the antibody sequence in FIG. 3, including for example, CHA.7.518.1.H4(S241P)vhCDR1, CHA.7.518.1.H4(S241P)vhCDR2, CHA.7.518.1.H4(S241P)vhCDR3, CHA.7.518.1.H4(S241P)vlCDR1, CHA.7.518.1.H4(S241P)vlCDR2, and CHA.7.518.1.H4(S241P)vlCDR3.

[0737] In some embodiments, cancer patients having DC1 in the tumor, tumor microenvironment, and/or peripheral blood, with at least 5%, 10% 20%, 30%, 40%, 50%, 60%, 70%, 80%, or 90% PVRL2 expression had a higher probability to respond to an anti-PVRIG antibody treatment as compared to a cancer patient with lower PVRL2 expression. In some embodiments, the anti-PVRIG antibody comprises the antibody sequence in FIG. 3, including for example, CHA.7.518.1.H4(S241P)vhCDR1, CHA.7.518.1.H4(S241P)vhCDR2, CHA.7.518.1.H4(S241P)vhCDR3, CHA.7.518.1.H4(S241P)vlCDR1, CHA.7.518.1.H4(S241P)vlCDR2, and CHA.7.518.1.H4(S241P)vlCDR3.

[0738] In some embodiments, cancer patients having DC2 in the tumor, tumor microenvironment, and/or peripheral blood, with at least 10%, 20%, 30%, 40%, 50%, 60%, 70%, 80%, or 90% PVRL2 expression, had a higher probability to respond an anti-PVRIG antibody treatment as compared to cancer patient with lower PVRL2 expression. In some embodiments, the anti-PVRIG antibody comprises the antibody sequence in FIG. 3, including for example, CHA.7.518.1.H4(S241P)vhCDR1, CHA.7.518.1.H4(S241P)vhCDR2, CHA.7.518.1.H4(S241P)vhCDR3, CHA.7.518.1.H4(S241P)vlCDR1, CHA.7.518.1.H4(S241P)vlCDR2, and CHA.7.518.1.H4(S241P)vlCDR3.

[0739] Cancer patients that have the presence of any of. Activated DC cells, DC1, and DC2, expressing PVRL2, at least 0.1%, at least 0.2%, at least 0.3%, at least 0.4%, at least 0.5%, at least 0.6%, at least 0.7%, at least 0.8%, at least 0.9%, at least 1%, at least 1.5%, at least 2%, at least 2.5%, at least 3%, at least 3.5%, at least 4%, at least 4.5%, or at least 5%, at least 10%, at least 15%, at least 20%, at least 25%, or at least 30%, out of total myeloid cells in a biological sample obtained from a tumor, tumor microenvironment, and/or peripheral blood, have a higher probability to respond the anti-PVRIG treatment.

[0740] In some embodiments, the DC cells disclosed herein further express CXCL10. In some embodiments, the DC cells expressing CXCL10 are activated DC cells. In some embodiments, the expression level of CXCL10 by activated DC cells is correlated with the expression level of one or more biomarkers of T cells such as early memory CD8 T cells that are selected from the group consisting of GZMK, GZMA, GZMM, NKG7, TNFSF9, SH2D1A, EOMES, DTHD1, SLAMF7, FCRL3, CD28, CMC1, CCL4, CTS7, ITM2C, KLRG1, CRTAM, PECAM1, TCF7, CXCR3, LYAR, and HLA-DRB5. In some embodiments, the expression of CXCL10 is correlated with the expression of CXCR3. In some embodiments, the correlated expressions of CXCL10 and CXCR3 can be employed as a biomarker or companion diagnostic for use in the determining treatment regimens as well as predicting or determining treatment efficacy with an anti-PVRIG antibody. In some embodiments, the co-presence of CXCL10+ activated DC cells and CXCR3 T cells can be employed as a biomarker or companion diagnostic for use in the determining treatment regimens as well as predicting or determining treatment efficacy for treatment with an anti-PVRIG antibody.

[0741] B. PVRIG

[0742] In some embodiments, the level of PVRIG expression can be employed as a biomarker or companion diagnostic for use in the determining treatment regimens as well as predicting or determining treatment efficacy. In some embodiments, the level of PVRIG expression can be employed as a biomarker or companion diagnostic for use in the determining treatment regimens as well as predicting or determining treatment efficacy for treatment with an anti-PVRIG antibody. In some embodiments, the PVRIG status is defined based on the percentage staining for all tumor infiltrating immune cells. In some embodiments, the expression is categorized based on expression staining criteria below, in Table 2.

TABLE 2
PVRIG Staining Criteria

| PVRIG status | Staining criteria | Predicted response |
|---|---|---|
| negative | 0% membrane | No to minimal |
| Low positive | >5% immune infiltrating | likely |
| | cells at any intensity | |
| | membrane or cytoplasmatic | |
| Low positive | Any positive immune | likely |
| | infiltrating cells in TLS or | |
| | lymphoid aggregates at any | |
| | intensity membrane or | |
| | cytoplasmatic | |
| Strong positive | Combination of the two | Very likely |
| | criteria above | |

[0743] In some embodiments, the level of PVRIG expression is determined by measuring the level of PVRIG using immunohistochemistry. In some embodiments, the level of PVRIG expression, including the level of PVRIG expression, is scored by a board-certified pathologist.

[0744] In some embodiments, the PVRIG expression level is determined using immunohistochemistry. In some embodiments, the PVRIG antibody used for the immunohistochemistry is AB-635 PVRIG Ab (6D8-1 clone). The amino acids sequence of the variable light chain, variable heavy chain and the corresponding CDRs of 6D8-1 Ab is presented in FIG. 23. In some embodiments, the PVRIG antibody used for the immunohistochemistry is 6D8-1. In some embodiments, the PVRIG antibody used for the immunohistochemistry is 6D8-1 (heavy chain SEQ ID NO:659 and light chain SEQ ID NO:663). In some embodiments, the PVRIG antibody used for the immunohistochemistry comprises:
[0745] i) a heavy chain variable domain comprising the vhCDR1, vhCDR2, and vhCDR3 from the heavy chain of 6D8-1 (SEQ ID NO:659), and
[0746] ii) a light chain variable domain comprising the vlCDR1, vlCDR2, and vlCDR3 from the light chain of 6D8-1 (SEQ ID NO:663).

[0747] In some embodiments, the PVRIG expression level is categorized as strong positive, low positive, or negative. In some embodiments, the PVRIG expression level is categorized as strong positive, low positive with >5% immune infiltrating cells at any intensity membrane or cytoplasmatic, low positive with any positive immune infiltrating cells in TLS or lymphoid aggregates at any intensity membrane or cytoplasmatic, or negative.

[0748] In some embodiments, the PVRIG expression is categorized as strong positive or low positive. In some embodiments, the PVRIG expression level is categorized as strong positive, low positive with >5% immune infiltrating cells at any intensity membrane or cytoplasmatic, or low positive with any positive immune infiltrating cells in TLS or lymphoid aggregates at any intensity membrane or cytoplasmatic. In some embodiments, when PVRIG expression is categorized as strong positive or low positive, there is predicted to be a response to an anti-PVRIG antibody. In some embodiments, when PVRIG expression is categorized as strong positive, there is predicted to be an increased likelihood of response to an anti-PVRIG antibody. In some embodiments, the anti-PVRIG antibody comprises the antibody sequence in FIG. 3, including for example, CHA.7.518.1.H4(S241P)vhCDR1, CHA.7.518.1.H4(S241P)vhCDR2, CHA.7.518.1.H4(S241P)vhCDR3, CHA.7.518.1.H4(S241P)vlCDR1, CHA.7.518.1.H4(S241P)vlCDR2, and CHA.7.518.1.H4(S241P)vlCDR3.

[0749] In some embodiments, the PVRIG expression is 0% membrane staining there is predicted to be no response or a minimal response to an anti-PVRIG antibody. In some embodiments, the anti-PVRIG antibody comprises the antibody sequence in FIG. 3, including for example, CHA.7.518.1.H4(S241P)vhCDR1, CHA.7.518.1.H4(S241P)vhCDR2, CHA.7.518.1.H4(S241P)vhCDR3, CHA.7.518.1.H4(S241P)vlCDR1, CHA.7.518.1.H4(S241P)vlCDR2, and CHA.7.518.1.H4(S241P)vlCDR3.

[0750] In some embodiments, the PVRIG expression is >5% immune infiltrating cells at any intensity membrane or cytoplasmatic is predicted to be a response to an anti-PVRIG antibody. In some embodiments, the anti-PVRIG antibody comprises the antibody sequence in FIG. 3, including for example, CHA.7.518.1.H4(S241P)vhCDR1, CHA.7.518.1.H4(S241P)vhCDR2, CHA.7.518.1.H4(S241P)vhCDR3, CHA.7.518.1.H4(S241P)vlCDR1, CHA.7.518.1.H4(S241P)vlCDR2, and CHA.7.518.1.H4(S241P)vlCDR3.

[0751] In some embodiments, the PVRIG expression is any positive immune infiltrating cells in TLS or lymphoid aggregates at any intensity membrane or cytoplasmatic there is predicted to be a response to an anti-PVRIG antibody. In some embodiments, the anti-PVRIG antibody comprises the antibody sequence in FIG. 3, including for example, CHA.7.518.1.H4(S241P)vhCDR1, CHA.7.518.1.H4(S241P)vhCDR2, CHA.7.518.1.H4(S241P)vhCDR3, CHA.7.518.1.H4(S241P)vlCDR1, CHA.7.518.1.H4(S241P)vlCDR2, and CHA.7.518.1.H4(S241P)vlCDR3.

[0752] In some embodiments, there is an increased prediction of a response to an anti-PVRIG antibody when the PVRIG expression is characterized by the following two expression levels:
[0753] >5% immune infiltrating cells staining at any intensity membrane or cytoplasmatic, and
[0754] any positive immune infiltrating cells in TLS or lymphoid aggregates staining at any intensity membrane or cytoplasmatic.

[0755] In some embodiments, there is an increased prediction of a response to the anti-PVRIG antibody comprising the antibody sequence in FIG. 3, including for example, CHA.7.518.1.H4(S241P)vhCDR1, CHA.7.518.1.H4(S241P)vhCDR2, CHA.7.518.1.H4(S241P)vhCDR3, CHA.7.518.1.H4(S241P)vlCDR1, CHA.7.518.1.H4(S241P)vlCDR2, and CHA.7.518.1.H4(S241P)vlCDR3, when the PVRL2 expression is characterized by at least two of the following:
[0756] 5% immune infiltrating cells staining at any intensity membrane or cytoplasmatic, and
[0757] any positive immune infiltrating cells in TLS or lymphoid aggregates staining at any intensity membrane or cytoplasmatic.

[0758] In some embodiments, cancer patients having at least 10%, 20%, 30%, 40%, 50%, 60%, 70%, 80%, 90%, or 100% of immune cells in the tumor, tumor microenvironment, and/or peripheral blood expressing PVRIG, had a higher probability to respond to the anti-PVRIG antibody treatment. In some embodiments, the anti-PVRIG antibody comprises the antibody sequence in FIG. 3, including for example, CHA.7.518.1.H4(S241P)vhCDR1, CHA.7.518.1.H4(S241P)vhCDR2, CHA.7.518.1.H4(S241P)vhCDR3, CHA.7.518.1.H4(S241P)vlCDR1, CHA.7.518.1.H4(S241P)vlCDR2, and CHA.7.518.1.H4(S241P)vlCDR3.

[0759] In some embodiments, cancer patients having at least 10%, 20%, 30%, 40%, 50%, 60%, 70%, 80%, 90%, or 100% of TSCM, TRM, naïve, exhausted, cycling, memory, and/or effector CD8 and/or CD4 positive T cells in the tumor, tumor microenvironment, and/or peripheral blood expressing PVRIG, had a higher probability to respond to the anti-PVRIG antibody treatment. In some embodiments, the anti-PVRIG antibody comprises the antibody sequence in FIG. 3, including for example, CHA.7.518.1.H4(S241P)vhCDR1, CHA.7.518.1.H4(S241P)vhCDR2, CHA.7.518.1.H4(S241P)vhCDR3, CHA.7.518.1.H4(S241P)vlCDR1, CHA.7.518.1.H4(S241P)vlCDR2, and CHA.7.518.1.H4(S241P)vlCDR3.

[0760] In some embodiments, cancer patients having at least 10%, 20%, 30%, 40%, 50%, 60%, 70%, 80%, 90%, or 100% of NK cells, NKT cells, gamma-delta T cells, T cells, CD4 positive T cells, and/or CD8 positive T cells in the tumor, tumor microenvironment, and/or peripheral blood expressing PVRIG, had a higher probability to respond to the anti-PVRIG antibody treatment. In some embodiments, the anti-PVRIG antibody comprises the antibody sequence in FIG. 3, including for example, CHA.7.518.1.H4(S241P)vhCDR1, CHA.7.518.1.H4(S241P)vhCDR2, CHA.7.518.1.H4(S241P)vhCDR3, CHA.7.518.1.H4(S241P)vlCDR1, CHA.7.518.1.H4(S241P)vlCDR2, and CHA.7.518.1.H4(S241P)vlCDR3.

[0761] In some embodiments, cancer patients having at least 10%, 20%, 30%, 40%, 50%, 60%, 70%, 80%, 90%, or 100% of CD4 positive T cells and/or CD8 positive T cells in the tumor, tumor microenvironment, and/or peripheral blood expressing PVRIG, had a higher probability to respond to the anti-PVRIG antibody treatment. In some embodiments, the anti-PVRIG antibody comprises the antibody sequence in FIG. 3, including for example, CHA.7.518.1.H4(S241P)vhCDR1, CHA.7.518.1.H4(S241P)vhCDR2, CHA.7.518.1.H4(S241P)vhCDR3, CHA.7.518.1.H4(S241P)vlCDR1, CHA.7.518.1.H4(S241P)vlCDR2, and CHA.7.518.1.H4(S241P)vlCDR3.

[0762] In some embodiments, cancer patients, having at least 10%%, 20%, 30%, 40%, 50%, 60%, 70%, 80%, 90%, or 100% of CD8 positive T cells in the tumor, tumor microenvironment, and/or peripheral blood expressing PVRIG, had a higher probability to respond to the anti-PVRIG antibody treatment. In some embodiments, the anti-PVRIG antibody comprises the antibody sequence in FIG. 3, including for example, CHA.7.518.1.H4(S241P)vhCDR1, CHA.7.518.1.H4(S241P)vhCDR2, CHA.7.518.1.H4(S241P)vhCDR3, CHA.7.518.1.H4(S241P)vlCDR1, CHA.7.518.1.H4(S241P)v1CDR2, and CHA.7.518.1.H4(S241P)vlCDR3.

[0763] In some embodiments, cancer patients, having at least 5%, 10%, 20%, 30%, 40%, 50%, 60%, 70%, 80%, 90%, or 100% of memory CD4 positive T cells in the tumor, tumor microenvironment, and/or peripheral blood expressing PVRIG, had a higher probability to respond to the anti-PVRIG antibody treatment as compared to a cancer patient with lower PVRIG expression. In some embodiments, the anti-PVRIG antibody comprises the antibody sequence in FIG. 3, including for example, CHA.7.518.1.H4(S241P)vhCDR1, CHA.7.518.1.H4(S241P)vhCDR2, CHA.7.518.1.H4(S241P)vhCDR3, CHA.7.518.1.H4(S241P)vlCDR1, CHA.7.518.1.H4(S241P)vlCDR2, and CHA.7.518.1.H4(S241P)vlCDR3.

[0764] In some embodiments, cancer patients, having at least 10%%, 20%, 30%, 40%, 50%, 60%, 70%, 80%, 90%, or 100% of TSCM cells in the tumor, tumor microenvironment, and/or peripheral blood expressing PVRIG, had a higher probability to respond to the anti-PVRIG antibody treatment as compared to cancer patient with lower PVRIG expression. In some embodiments, the anti-PVRIG antibody comprises the antibody sequence in FIG. 3, including for example, CHA.7.518.1.H4(S241P)vhCDR1, CHA.7.518.1.H4(S241P)vhCDR2, CHA.7.518.1.H4(S241P)vhCDR3, CHA.7.518.1.H4(S241P)vlCDR1, CHA.7.518.1.H4(S241P)vlCDR2, and CHA.7.518.1.H4(S241P)vlCDR3.

[0765] In some embodiments, cancer patients, having at least 10%, 20%, 30%, 40%, 50%, 60%, 70%, 80%, 90%, or 100% of Naïve CD8 cells in the tumor, tumor microenvironment, and/or peripheral blood expressing PVRIG, had a higher probability to respond to the anti-PVRIG antibody treatment as compared to cancer patient with lower PVRIG expression. In some embodiments, the anti-PVRIG antibody comprises the antibody sequence in FIG. 3, including for example, CHA.7.518.1.H4(S241P)vhCDR1, CHA.7.518.1.H4(S241P)vhCDR2, CHA.7.518.1.H4(S241P)vhCDR3, CHA.7.518.1.H4(S241P)vlCDR1, CHA.7.518.1.H4(S241P)vlCDR2, and CHA.7.518.1.H4(S241P)vlCDR3.

[0766] In some embodiments, cancer patients, having at least 10%, 20%, 30%, 40%, 50%, 60%, 70%, 80%, 90%, or 100% of exhausted CD8 cells in the tumor, tumor microenvironment, and/or peripheral blood expressing PVRIG, had a higher probability to respond to the anti-PVRIG antibody treatment as compared to cancer patient with lower PVRIG expression. In some embodiments, the anti-PVRIG antibody comprises the antibody sequence in FIG. 3, including for example, CHA.7.518.1.H4(S241P)vhCDR1, CHA.7.518.1.H4(S241P)vhCDR2, CHA.7.518.1.H4(S241P)vhCDR3, CHA.7.518.1.H4(S241P)vlCDR1, CHA.7.518.1.H4(S241P)vlCDR2, and CHA.7.518.1.H4(S241P)vlCDR3.

[0767] In some embodiments, cancer patients, having at least 10%, 20%, 30%, 40%, 50%, 60%, 70%, 80%, 90%, or 100% of Naïve CD4 positive T cells in the tumor, tumor microenvironment, and/or peripheral blood expressing PVRIG, had a higher probability to respond to the anti-PVRIG antibody treatment as compared to a cancer patient with lower PVRIG expression. In some embodiments, the anti-PVRIG antibody comprises the antibody sequence in FIG. 3, including for example, CHA.7.518.1.H4(S241P)vhCDR1, CHA.7.518.1.H4(S241P)vhCDR2, CHA.7.518.1.H4(S241P)vhCDR3, CHA.7.518.1.H4(S241P)vlCDR1, CHA.7.518.1.H4(S241P)vlCDR2, and CHA.7.518.1.H4(S241P)vlCDR3.

[0768] In some embodiments, cancer patients, having at least 10%, 20%, 30%, 40%, 50%, 60%, 70%, 80%, 90%, or 100% of exhausted CD4 positive T cells in the tumor, tumor microenvironment, and/or peripheral blood expressing PVRIG, had a higher probability to respond to the anti-PVRIG antibody treatment as compared to a cancer patient with lower PVRIG expression. In some embodiments, the anti-PVRIG antibody comprises the antibody sequence in FIG. 3, including for example, CHA.7.518.1.H4(S241P)vhCDR1, CHA.7.518.1.H4(S241P)vhCDR2, CHA.7.518.1.H4(S241P)vhCDR3, CHA.7.518.1.H4(S241P)vlCDR1, CHA.7.518.1.H4(S241P)vlCDR2, and CHA.7.518.1.H4(S241P)vlCDR3.

[0769] In some embodiments, cancer patients, having at least 5%, 10%, 20%, 30%, 40%, 50%, 60%, 70%, 80%, 90%, or 100% of TRM cells in the tumor, tumor microenvironment, and/or peripheral blood expressing PVRIG, exhibit a higher probability to respond to the anti-PVRIG antibody treatment as compared to cancer patient with lower PVRIG expression. In some embodiments, the anti-PVRIG antibody comprises the antibody sequence in FIG. 3, including for example, CHA.7.518.1.H4(S241P)vhCDR1, CHA.7.518.1.H4(S241P)vhCDR2, CHA.7.518.1.H4(S241P)vhCDR3, CHA.7.518.1.H4(S241P)vlCDR1, CHA.7.518.1.H4(S241P)v1CDR2, and CHA.7.518.1.H4(S241P)vlCDR3.

[0770] In some embodiments, cancer patients, having at least 5%, 10%, 20%, 30%, 40%, 50%, 60%, 70%, 80%, 90%, or 100% of Effector cells in the tumor, tumor microenvironment, and/or peripheral blood expressing PVRIG, had a higher probability to respond to the anti-PVRIG antibody treatment as compared to cancer patient with lower PVRIG expression. In some embodiments, the anti-PVRIG antibody comprises the antibody sequence in FIG. 3, including for example, CHA.7.518.1.H4(S241P)vhCDR1, CHA.7.518.1.H4(S241P)vhCDR2, CHA.7.518.1.H4(S241P)vhCDR3, CHA.7.518.1.H4(S241P)vlCDR1, CHA.7.518.1.H4(S241P)vlCDR2, and CHA.7.518.1.H4(S241P)vlCDR3.

[0771] In some embodiments, cancer patients, the invention provides a method for determining a cancer patient population for treatment with an anti-PVRIG antibody, the method comprising:
[0772] (a) detecting the presence in a biological sample from the cancer patient one or more cellular components selected from the group consisting of:
   [0773] (i) TSCM, TRM, naïve, exhausted, cycling, and effector CD8 positive T cells, that express PVRIG; and/or
   [0774] (ii) activated DC cells, DC1, and/or DC2 that express PVRL2,
[0775] (b) quantitating the measurement of the level of components selected from the group consisting of:
   [0776] (i) TSCM, TRM, naïve, exhausted, cycling, and effector CD8 positive T cells, that express PVRIG; and/or
   [0777] (ii) activated DC cells, DC1, and/or DC2 that express PVRL2; and
[0778] (c) treating the cancer patient with an anti-PVRIG antibody when one or more cellular components in (a) are present at an increased level as compared to a control or a patient that does not have detectable levels of the cells.

[0779] In some embodiments, cancer patients, the invention provides a method for predicting or determining the efficacy of treatment with an anti-PVRIG treatment antibody, the method comprising:
[0780] (a) measuring the level of one or more cellular components selected from the group consisting of:
   [0781] (i) TSCM, TRM, naïve, exhausted, cycling, and effector CD8 positive T cells, that express PVRIG; and/or
   [0782] (ii) activated DC cells, DC1, and DC2 that express PVRL2;
[0783] (b) quantitating the measurement of the level of one or more cellular components selected from the group consisting of:
   [0784] (i) TSCM, TRM, naïve, exhausted, cycling, and effector CD8 positive T cells, expressing PVRIG; and/or
   [0785] (ii) activated DC cells, DC1, and DC2 that express PVRL2; and
[0786] (c) correlating the level of the cellular components with the efficacy of treatment, wherein any of the cellular components being present and/or being present at an increased level as compared to a control or a patient that does not have detectable levels of the cells, is indicative of treatment efficacy for treatment with an anti-PVRIG treatment antibody; and
[0787] (d) optionally treating the cancer patient with an anti-PVRIG antibody when any of the cellular components in (a) are present at an increased level as compared to a control or a patient that does not have detectable levels of the cells. In some embodiments, provided is a method for predicting or determining the efficacy of treatment or determining a population for treatment with an anti-PVRIG treatment antibody when any of TSCM, TRM, naïve, exhausted, cycling, and effector CD8 positive T cells, that express PVRIG comprise at least 0.5%, at least 1%, at least 1.5%, at least 2%, at least 2.5%, at least 3%, at least 3.5%, at least 4%, at least 4.5%, at least 5%, at least 10%, at least 15%, at least 20%, at least 25%, at least 30%, at least 35%, at least 40%, at least 45%, at least 50%, at least 55%, at least 60%, at least 65%, at least 70%, at least 75%, at least 80%, or at least 85%, of the total CD8 cells in the biological sample is indicative of treatment efficacy and/or indicative for treatment with an anti-PVRIG antibody. In some embodiments, cancer patients where any of TSCM, TRM, naïve, exhausted, cycling, and effector CD8 positive T cells, that express PVRIG comprise at least 0.5%, at least 1%, at least 1.5%, at least 2%, at least 2.5%, at least 3%, at least 3.5%, at least 4%, at least 4.5%, or at least 5% at least 10%, at least 15%, at least 20%, at least 25%, at least 30%, at least 35%, at least 40%, at least 45%, at least 50%, at least 55%, at least 60%, at least 65%, at least 70%, at least 75%, at least 80%, or at least 85%, of the total CD8 cells in the biological sample exhibit a higher probability to respond to the anti-PVRIG antibody treatment.

[0788] In some embodiments, provided is a method for predicting or determining the efficacy of treatment or determining a population for treatment with an anti-PVRIG treatment antibody when any of activated DC cells, DC1, and DC2 that express the PVRL2 comprise at least 0.1%, at least 0.2%, at least 0.3%, at least 0.4%, at least 0.5%, at least 0.6%, at least 0.7%, at least 0.8%, at least 0.9%, at least 1%, at least 1.5%, at least 2%, at least 2.5%, at least 3%, at least 3.5%, at least 4%, at least 4.5%, or at least 5%, at least 10%, at least 15%, at least 20%, at least 25%, or at least 30%, out of total myeloid cells in the biological sample.

[0789] In some embodiments, cancer patients where any of activated DC cells, DC1, and DC2 that express the PVRL2 comprise at least 0.1%, at least 0.2%, at least 0.3%, at least 0.4%, at least 0.5%, at least 0.6%, at least 0.7%, at least 0.8%, at least 0.9%, at least 1%, at least 1.5%, at least 2%, at least 2.5%, at least 3%, at least 3.5%, at least 4%, at least 4.5%, or at least 5%, at least 10%, at least 15%, at least 20%, at least 25%, or at least 30%, out of total myeloid cells in the biological sample exhibit a higher probability to respond to the anti-PVRIG antibody treatment.

[0790] In some embodiments, the presence of and/or an increased level as compared to an untreated control and/or to a control prior to treatment, of one more cellular components is indicative of anti-PVRIG treatment efficacy:
[0791] (i) TSCM, TRM, naïve, exhausted, cycling, and effector CD8 positive T cells, that express PVRIG comprise at least 0.5%, at least 1%, at least 1.5%, at least 2%, at least 2.5%, at least 3%, at least 3.5%, at least 4%, at least 4.5%, or at least 5%, at least 10%, at least 15%, at least 20%, at least 25%, at least 30%, at least 35%, at least 40%, at least 45%, at least 50%, at least 55%, at least 60%, at least 65%, at least 70%, at least 75%, at least 80%, or at least 85%, out of total CD8 cells in the biological sample; and/or
[0792] (ii) DC cells, DC1, and DC2 that express PVRL2 comprise at least 0.1%, at least 0.2%, at least 0.3%, at least 0.4%, at least 0.5%, at least 0.6%, at least 0.7%, at least 0.8%, at least 0.9%, at least 1%, at least 1.5%, at least 2%, at least 2.5%, at least 3%, at least 3.5%, at least 4%, at least 4.5%, or at least 5%, at least 10%, at least 15%, at least 20%, at least 25%, or at least 30%, out of total myeloid cells in the biological sample.

[0793] In some embodiments, the biological sample is obtained from a tumor, tumor microenvironment, and/or peripheral blood from the cancer patient.

[0794] In some embodiments, the invention provides a method for determining a cancer patient population for treatment with an anti-PVRIG antibody, the method comprising:
[0795] (a) detecting the presence of DNAM-1 and/or PVRIG in a biological sample from the cancer patient;
[0796] (b) quantitating the measurement of the level of DNAM-1 and/or PVRIG; and
[0797] (c) treating the cancer patient with an anti-PVRIG antibody when any of DNAM-1 and/or PVRIG in (a) as quantitated in step (b) are present and/or present at an increased level as compared to a control or a patient that does not have detectable levels of the cells.

[0798] In some embodiments, present and/or present at an increased level is as compared to absent.

[0799] In some embodiments, the biological sample comprises immune cells.

[0800] In some embodiments, the invention provides a method for predicting or determining the efficacy of treatment for a cancer patient with an anti-PVRIG treatment antibody, the method comprising:
[0801] (a) measuring the level of DNAM-1 and/or PVRIG;
[0802] (b) quantitating the measurement of the level of DNAM-1 and/or PVRIG;
[0803] (c) correlating the level of the DNAM-1 and/or PVRIG with the efficacy of treatment, wherein any of DNAM-1 and/or PVRIG being present and/or being present at an increased level as compared to a control or a patient that does not have detectable levels of the cells, is indicative of treatment efficacy for treatment with an anti-PVRIG treatment antibody; and
[0804] (d) optionally treating the cancer patient with an anti-PVRIG antibody when any DNAM-1 and/or PVRIG in (a) are present at an increased level as compared to a control or a patient that does not have detectable levels of the cells.

[0805] In some embodiments, present and/or being present at an increased level is as compared to the absence of expression or the absence of detectable levels.

[0806] In some embodiments, provided is a method for predicting or determining the efficacy of treatment or determining a population for treatment with an anti-PVRIG treatment antibody when any of TSCM, TRM, naïve, memory, exhausted, cycling, and effector CD8 and/or CD4 T cells that express PVRIG comprise at least 0.5%, at least 1%, at least 1.5%, at least 2%, at least 2.5%, at least 3%, at least 3.5%, at least 4%, at least 4.5%, at least 5%, at least 10%, at least 15%, at least 20%, at least 25%, at least 30%, at least 35%, at least 40%, at least 45%, at least 50%, at least 55%, at least 60%, at least 65%, at least 70%, at least 75%, at least 80%, or at least 85%, of the total CD8 and/or CD4 cells in the biological sample is indicative of treatment efficacy and/or indicative for treatment with an anti-PVRIG antibody. In some embodiments, cancer patients where any of TSCM, TRM, naïve, exhausted, cycling, memory, effector CD8 positive and effector CD4 positive T cells, that express PVRIG comprise at least 0.5%, at least 1%, at least 1.5%, at least 2%, at least 2.5%, at least 3%, at least 3.5%, at least 4%, at least 4.5%, or at least 5% at least 10%, at least 15%, at least 20%, at least 25%, at least 30%, at least 35%, at least 40%, at least 45%, at least 50%, at least 55%, at least 60%, at least 65%, at least 70%, at least 75%, at least 80%, or at least 85%, of the total CD8 and/or CD4 cells in the biological sample exhibit a higher probability to respond to the anti-PVRIG antibody treatment.

[0807] In some embodiments, provided is a method for predicting or determining the efficacy of treatment or determining a population for treatment with an anti-PVRIG treatment antibody when any of activated DC cells, DC1, and DC2 that express the DNAM-1 comprise at least 0.1%, at least 0.2%, at least 0.3%, at least 0.4%, at least 0.5%, at least 0.6%, at least 0.7%, at least 0.8%, at least 0.9%, at least 1%, at least 1.5%, at least 2%, at least 2.5%, at least 3%, at least 3.5%, at least 4%, at least 4.5%, or at least 5%, at least 10%, at least 15%, at least 20%, at least 25%, or at least 30%, out of total myeloid cells in the biological sample.

[0808] In some embodiments, cancer patients where any of activated DC cells, DC1, and DC2 that express the DNAM-1 comprise at least 0.1%, at least 0.2%, at least 0.3%, at least 0.4%, at least 0.5%, at least 0.6%, at least 0.7%, at least 0.8%, at least 0.9%, at least 1%, at least 1.5%, at least 2%, at least 2.5%, at least 3%, at least 3.5%, at least 4%, at least 4.5%, or at least 5%, at least 10%, at least 15%, at least 20%, at least 25%, or at least 30%, out of total myeloid cells in the biological sample exhibit a higher probability to respond to the anti-PVRIG antibody treatment.

[0809] In some embodiments, the presence of and/or an increased level as compared to an untreated control and/or to a control prior to treatment, of one or more cellular components is indicative of anti-PVRIG treatment efficacy:
[0810] (i) TSCM, TRM, naïve, exhausted, cycling, memory, and effector CD4 positive T cells, that express PVRIG comprise at least 0.5%, at least 1%, at least 1.5%, at least 2%, at least 2.5%, at least 3%, at least 3.5%, at least 4%, at least 4.5%, or at least 5%, at least 10%, at least 15%, at least 20%, at least 25%, at least 30%, at least 35%, at least 40%, at least 45%, at least 50%, at least 55%, at least 60%, at least 65%, at least 70%, at least 75%, at least 80%, or at least 85%, out of total CD4 cells in the biological sample; and/or
[0811] (ii) DC cells, DC1, and DC2 that express DNAM-1 comprise at least 0.1%, at least 0.2%, at least 0.3%, at least 0.4%, at least 0.5%, at least 0.6%, at least 0.7%, at least 0.8%, at least 0.9%, at least 1%, at least 1.5%, at least 2%, at least 2.5%, at least 3%, at least 3.5%, at least 4%, at least 4.5%, or at least 5%, at least 10%, at least 15%, at least 20%, at least 25%, or at least 30%, out of total myeloid cells in the biological sample.

[0812] In some embodiments, the biological sample is obtained from a tumor, tumor microenvironment, and/or peripheral blood from the cancer patient.

[0813] C. DNAM-1

[0814] In some embodiments, the level of DNAM-1 (also referred to as CD226) expression can be employed as a biomarker or companion diagnostic for use in determining treatment regimens as well as predicting or determining treatment efficacy. In some embodiments, the level of DNAM-1 expression can be employed as a biomarker or companion diagnostic for use in determining treatment regimens as well as predicting or determining treatment efficacy for treatment with an anti-PVRIG antibody. In some embodiments, the DNAM-1 status is defined based on the percentage staining for all tumor infiltrating immune cells. In some embodiments, the expression is categorized based on expression staining criteria below, in Table 3.

TABLE 3
DNAM-1 Staining Criteria

| DNAM-1 status | Staining criteria | Predicted response |
|---|---|---|
| negative | 0% | No to minimal |
| Immune | >3% immune infiltrating | likely |
| Positivity (IS) | cells at any intensity | |

[0815] In some embodiments, the level of DNAM-1 expression is determined by measuring the level of DNAM-1 using immunohistochemistry. In some embodiments, the level of DNAM-1 expression is scored by a board-certified pathologist.

[0816] In some embodiments, the DNAM-1 expression level is determined using immunohistochemistry. In some embodiments, the PVRIG expression level is determined using immunohistochemistry.

[0817] In some embodiments, the DNAM-1 antibody used for the immunohistochemistry is selected from the group consisting of DNAM-1/CD226 (E8L9G) XP® Rabbit mAb #66631 from Cell Signaling Technology, Mouse Anti-CD226 Recombinant Antibody (clone MM0248-1X20) from Creative Biolabs, Cluster of Differentiation 226 (CD226) Antibody abx171784 from Abbexa, and Recombinant Anti-CD226 antibody [EPR20710] (ab212077) from Abcam.

[0818] In some embodiments, the DNAM-1 expression level is categorized as strong, moderate, weak, or negative.

[0819] In some embodiments, the DNAM-1 expression is categorized as strong or moderate. In some embodiments, when DNAM-1 expression is categorized as strong or moderate, there is predicted to be a response to an anti-PVRIG antibody. In some embodiments, the anti-PVRIG antibody comprises the antibody sequence in FIG. 3, including for example, CHA.7.518.1.H4(S241P)vhCDR1, CHA.7.518.1.H4(S241P)vhCDR2, CHA.7.518.1.H4(S241P)vhCDR3, CHA.7.518.1.H4(S241P)vlCDR1, CHA.7.518.1.H4(S241P)vlCDR2, and CHA.7.518.1.H4(S241P)vlCDR3.

[0820] In some embodiments, the DNAM-1 expression level is categorized as 0—no signal, 1—low, 2—medium, or 3—high.

[0821] In some embodiments, the DNAM-1 expression is categorized as 2—medium or 3—high. In some embodiments, when DNAM-1 expression is categorized as 2—medium or 3—high, there is predicted to be a response to an anti-PVRIG antibody. In some embodiments, when DNAM-1 expression is categorized as 3—high, there is predicted to be an increased likelihood of response to an anti-PVRIG antibody. In some embodiments, the anti-PVRIG antibody comprises the antibody sequence in FIG. 3, including for example, CHA.7.518.1.H4(S241P)vhCDR1, CHA.7.518.1.H4(S241P)vhCDR2, CHA.7.518.1.H4(S241P)vhCDR3, CHA.7.518.1.H4(S241P)vlCDR1, CHA.7.518.1.H4(S241P)vlCDR2, and CHA.7.518.1.H4(S241P)vlCDR3.

[0822] In some embodiments, when the DNAM-1 expression is 0% immune cells staining, there is predicted to be no response or a minimal response to an anti-PVRIG antibody. In some embodiments, the anti-PVRIG antibody comprises the antibody sequence in FIG. 3, including for example, CHA.7.518.1.H4(S241P)vhCDR1, CHA.7.518.1.H4(S241P)vhCDR2, CHA.7.518.1.H4(S241P)vhCDR3, CHA.7.518.1.H4(S241P)vlCDR1, CHA.7.518.1.H4(S241P)vlCDR2, and CHA.7.518.1.H4(S241P)vlCDR3.

[0823] In some embodiments, when the DNAM-1 expression is >3% immune cells staining at +1 IHC score, there is predicted to be a response to an anti-PVRIG antibody. In some embodiments, the anti-PVRIG antibody comprises the antibody sequence in FIG. 3, including for example, CHA.7.518.1.H4(S241P)vhCDR1, CHA.7.518.1.H4(S241P)vhCDR2, CHA.7.518.1.H4(S241P)vhCDR3, CHA.7.518.1.H4(S241P)vlCDR1, CHA.7.518.1.H4(S241P)vlCDR2, and CHA.7.518.1.H4(S241P)vlCDR3.

[0824] In some embodiments, when the DNAM-1 expression is >3% immune cells staining at +1 IHC score, there is predicted to be a response to an anti-PVRIG antibody. In some embodiments, the anti-PVRIG antibody comprises the antibody sequence in FIG. 3, including for example, CHA.7.518.1.H4(S241P)vhCDR1, CHA.7.518.1.H4(S241P)vhCDR2, CHA.7.518.1.H4(S241P)vhCDR3, CHA.7.518.1.H4(S241P)vlCDR1, CHA.7.518.1.H4(S241P)vlCDR2, and CHA.7.518.1.H4(S241P)vlCDR3.

[0825] In some embodiments, when the DNAM-1 expression is >3% immune infiltrating cells at any intensity staining, there is predicted to be a response to an anti-PVRIG antibody. In some embodiments, the anti-PVRIG antibody comprises the antibody sequence in FIG. 3, including for example, CHA.7.518.1.H4(S241P)vhCDR1, CHA.7.518.1.H4(S241P)vhCDR2, CHA.7.518.1.H4(S241P)vhCDR3, CHA.7.518.1.H4(S241P)vlCDR1, CHA.7.518.1.H4(S241P)v1CDR2, and CHA.7.518.1.H4(S241P)vlCDR3.

[0826] In some embodiments, cancer patients having immune cells in the tumor, tumor microenvironment, and/or peripheral blood with at least 3%, 10%, 20%, 30%, 40%, 50%, 60%, 70%, 80%, or 90% DNAM-1 expression had a higher probability to respond to an anti-PVRIG antibody treatment as compared to a cancer patient with lower DNAM-1 expression. In some embodiments, the anti-PVRIG antibody comprises the antibody sequence in FIG. 3, including for example, CHA.7.518.1.H4(S241P)vhCDR1, CHA.7.518.1.H4(S241P)vhCDR2, CHA.7.518.1.H4(S241P)vhCDR3, CHA.7.518.1.H4(S241P)vlCDR1, CHA.7.518.1.H4(S241P)vlCDR2, and CHA.7.518.1.H4(S241P)vlCDR3.

[0827] In some embodiments, cancer patients having NK cells, NKT cells, gamma-delta T cells, T cells, CD8 and/or CD4 positive T cells in the tumor, tumor microenvironment, and/or peripheral blood with at least 3%, 10%, 20%, 30%, 40%, 50%, 60%, 70%, 80%, or 90% DNAM-1 expression had a higher probability to respond to an anti-PVRIG antibody treatment as compared to a cancer patient with lower DNAM-1 expression. In some embodiments, the anti-PVRIG antibody comprises the antibody sequence in FIG. 3, including for example, CHA.7.518.1.H4(S241P)vhCDR1, CHA.7.518.1.H4(S241P)vhCDR2, CHA.7.518.1.H4(S241P)vhCDR3, CHA.7.518.1.H4(S241P)vlCDR1, CHA.7.518.1.H4(S241P)vlCDR2, and CHA.7.518.1.H4(S241P)vlCDR3.

[0828] In some embodiments, cancer patients having CD8 and/or CD4 positive T cells in the tumor, tumor microenvironment, and/or peripheral blood with at least 3%, 10%, 20%, 30%, 40%, 50%, 60%, 70%, 80%, or 90% DNAM-1 expression had a higher probability to respond to an anti-PVRIG antibody treatment as compared to cancer patient with lower DNAM-1 expression. In some embodiments, the anti-PVRIG antibody comprises the antibody sequence in FIG. 3, including for example, CHA.7.518.1.H4(S241P)vhCDR1, CHA.7.518.1.H4(S241P)vhCDR2, CHA.7.518.1.H4(S241P)vhCDR3, CHA.7.518.1.H4(S241P)vlCDR1, CHA.7.518.1.H4(S241P)vlCDR2, and CHA.7.518.1.H4(S241P)vlCDR3.

[0829] In some embodiments, cancer patients having TSCM, TRM, naïve, exhausted, cycling, memory, and/or effector CD8 and/or CD4 positive T cells in the tumor, tumor microenvironment, and/or peripheral blood with at least 3%, 10%, 20%, 30%, 40%, 50%, 60%, 70%, 80%, or 90% DNAM-1 expression had a higher probability to respond to an anti-PVRIG antibody treatment as compared to a cancer patient with lower DNAM-1 expression. In some embodiments, the anti-PVRIG antibody comprises the antibody sequence in FIG. 3, including for example, CHA.7.518.1.H4(S241P)vhCDR1, CHA.7.518.1.H4(S241P)vhCDR2, CHA.7.518.1.H4(S241P)vhCDR3, CHA.7.518.1.H4(S241P)vlCDR1, CHA.7.518.1.H4(S241P)vlCDR2, and CHA.7.518.1.H4(S241P)vlCDR3.

[0830] In some embodiments, cancer patients having dendritic cells in the tumor, tumor microenvironment, and/or peripheral blood with at least 3%, 5%, 10%, 20%, 30%, 40%, 50%, 60%, 70%, 80%, or 90% DNAM-1 expression had a higher probability to respond to an anti-PVRIG antibody treatment as compared to a cancer patient with lower DNAM-1 expression. In some embodiments, the anti-PVRIG antibody comprises the antibody sequence in FIG. 3, including for example, CHA.7.518.1.H4(S241P)vhCDR1, CHA.7.518.1.H4(S241P)vhCDR2, CHA.7.518.1.H4(S241P)vhCDR3, CHA.7.518.1.H4(S241P)vlCDR1, CHA.7.518.1.H4(S241P)vlCDR2, and CHA.7.518.1.H4(S241P)vlCDR3.

[0831] In some embodiments, cancer patients having activated dendritic cells in the tumor, tumor microenvironment, and/or peripheral blood, with at least 3%, 5%, 10%, 20%, 30%, 40%, 50%, 60%, 70%, 80%, or 90% DNAM-1 expression had a higher probability to respond to an anti-PVRIG antibody treatment as compared to a cancer patient with lower DNAM-1 expression. In some embodiments, the anti-PVRIG antibody comprises the antibody sequence in FIG. 3, including for example, CHA.7.518.1.H4(S241P)vhCDR1, CHA.7.518.1.H4(S241P)vhCDR2, CHA.7.518.1.H4(S241P)vhCDR3, CHA.7.518.1.H4(S241P)vlCDR1, CHA.7.518.1.H4(S241P)vlCDR2, and CHA.7.518.1.H4(S241P)vlCDR3.

[0832] In some embodiments, cancer patients having DC1 in the tumor, tumor microenvironment, and/or peripheral blood, with at least 3%, 5%, 10% 20%, 30%, 40%, 50%, 60%, 70%, 80%, or 90% DNAM-1 expression had a higher probability to respond to an anti-PVRIG antibody treatment as compared to a cancer patient with lower DNAM-1 expression. In some embodiments, the anti-PVRIG antibody comprises the antibody sequence in FIG. 3, including for example, CHA.7.518.1.H4(S241P)vhCDR1, CHA.7.518.1.H4(S241P)vhCDR2, CHA.7.518.1.H4(S241P)vhCDR3, CHA.7.518.1.H4(S241P)vlCDR1, CHA.7.518.1.H4(S241P)vlCDR2, and CHA.7.518.1.H4(S241P)vlCDR3.

[0833] In some embodiments, cancer patients having DC2 in the tumor, tumor microenvironment, and/or peripheral blood, with at least 3%, 5%, 10%, 20%, 30%, 40%, 50%, 60%, 70%, 80%, or 90% DNAM-1 expression, had a higher probability to respond to an anti-PVRIG antibody treatment as compared to a cancer patient with lower DNAM-1 expression. In some embodiments, the anti-PVRIG antibody comprises the antibody sequence in FIG. 3, including for example, CHA.7.518.1.H4(S241P)vhCDR1, CHA.7.518.1.H4(S241P)vhCDR2, CHA.7.518.1.H4(S241P)vhCDR3, CHA.7.518.1.H4(S241P)vlCDR1, CHA.7.518.1.H4(S241P)vlCDR2, and CHA.7.518.1.H4(S241P)vlCDR3.

[0834] Cancer patients that have the presence of any of: Activated DC cells, DC1, and DC2, expressing DNAM-1, at least 0.1%, at least 0.2%, at least 0.3%, at least 0.4%, at least 0.5%, at least 0.6%, at least 0.7%, at least 0.8%, at least 0.9%, at least 1%, at least 1.5%, at least 2%, at least 2.5%, at least 3%, at least 3.5%, at least 4%, at least 4.5%, or at least 5%, at least 10%, at least 15%, at least 20%, at least 25%, or at least 30%, out of total myeloid cells in a biological sample obtained from a tumor, tumor microenvironment, and/or peripheral blood, have a higher probability to respond the anti-PVRIG treatment.

a. Early Memory CD8 T Cells

[0835] There are many various names refering to the “early memory T cells” in the literature, which include but are not limited to Transitional-memory T cells, TEM (T effector memory), Pre-dysfunctional, Stem-like memory, Circulating pre-cursors, Tpex-T progenitor exhausted. See, for example, van der Leun, et al., Nat Rev Cancer. 20(4):218-232 (2020; found on the World Wide Web at www.ncbi.nlm.nih.gov/pmc/articles/PMC7115982/; J. Exp. Med. 215(10):2520-2535 (2018); and Gueguen et al., Sci. Immunol. 6, eabd5778 (2021); all if which are incorporated herein by reference.

[0836] In some embodiments, the early memory CD8 T cells can be employed as a biomarker or companion diagnostic for use in the determining treatment regimens as well as predicting or determining treatment efficacy. In some embodiments, the presence of early memory CD8 T cells can be employed as a biomarker or companion diagnostic for use in the determining treatment regimens as well as predicting or determining treatment efficacy for treatment with an anti-PVRIG antibody. In some embodiments, the percentage of early memory CD8 T cells can be employed as a biomarker or companion diagnostic for use in the determining treatment regimens as well as predicting or determining treatment efficacy for treatment with an anti-PVRIG antibody. In some embodiments, the presence of at least 1% of early memory CD8 T cells out of total CD8 T cells in TME is indicative for predicting or determining treatment efficacy for treatment with an anti-PVRIG antibody. In some embodiments, the early memory CD8 T cell is a CD8 T cell expressing one or more of the markers selected from the group consisting of GZMK, GZMA, GZMM, NKG7, TNFSF9, SH2D1A, EOMES, DTHD1, SLAMF7, FCRL3, CD28, CMC1, CCL4, CTS7, ITM2C, KLRG1, CRTAM, PECAM1, TCF7, CXCR3, LYAR, and HLA-DRB5. In some embodiments, the early memory CD8 T cell is a CD8 T cell expressing two, three, four, five or more of the markers selected from the group consisting of GZMK, GZMA, GZMM, NKG7, TNFSF9, SH2D1A, EOMES, DTHD1, SLAMF7, FCRL3, CD28, CMC1, CCL4, CTS7, ITM2C, KLRG1, CRTAM, PECAM1, TCF7, CXCR3, LYAR, and HLA-DRB5. In some embodiments, the early memory CD8 T cell is a CD8 T cell expressing CXCR3. In some embodiments, the CXCR3 is localized in the vicinity of activated DC cells expressing such as CXCL10 expressing activated DC cells.

[0837] D. Cancer Types

[0838] In some embodiments, the PVRL2, DNAM-1, and/or PVRIG biomarkers can be used for determining, modifying, altering, and/or predicting the outcome for treatment of vascularized tumors. In some embodiments, the PVRL2 biomarker can be used for determining, modifying, altering, and/or predicting the outcome for treatment of vascularized tumors. In some embodiments, the DNAM-1 biomarker can be used for determining, modifying, altering, and/or predicting the outcome for treatment of vascularized tumors. In some embodiments, the PVRL2, DNAM-1, and/or PVRIG biomarkers can be used for determining, modifying, altering, and/or predicting the outcome for treatment of cancer including carcinoma, lymphoma, sarcoma, and/or leukemia. In some embodiments, the PVRL2 biomarker can be used for determining, modifying, altering, and/or predicting the outcome for treatment of cancer including carcinoma, lymphoma, sarcoma, and/or leukemia. In some embodiments, the DNAM-1 biomarker can be used for determining, modifying, altering, and/or predicting the outcome for treatment of cancer including carcinoma, lymphoma, sarcoma, and/or leukemia. In some embodiments, the PVRL2, DNAM-1, and/or PVRIG biomarkers can be used for determining, modifying, altering, and/or predicting the outcome for cancer including melanoma, non-melanoma skin cancer (squamous and basal cell carcinoma), mesothelioma, squamous cell cancer, lung cancer (including small-cell lung cancer, non-small cell lung cancer, soft-tissue sarcoma, Kaposi's sarcoma, adenocarcinoma of the lung, squamous carcinoma of the lung, cancer of the peritoneum, esophageal cancer, hepatocellular cancer, liver cancer (including HCC), gastric cancer, stomach cancer (including gastrointestinal cancer), pancreatic cancer, glioblastoma, cervical cancer, ovarian cancer, urothelial cancer, bladder cancer, hepatoma, glioma, brain cancer (as well as edema, such as that associated with brain tumors), breast cancer (including, for example, triple negative breast cancer), testis cancer, testicular germ cell tumors, colon cancer, colorectal cancer (CRC), colorectal cancer MSS (MSS-CRC; including refractory MSS colorectal; MSS=microsatellite stable status), primary peritoneal cancer, microsatellite stable primary peritoneal cancer, platinum resistant microsatellite stable primary peritoneal cancer, CRC (MSS unknown), rectal cancer, endometrial cancer (including endometrial carcinoma), uterine carcinoma, salivary gland carcinoma, kidney cancer, renal cell cancer (RCC), renal cell carcinoma (RCC), prostate cancer, vulval cancer, thyroid cancer, hepatic carcinoma, carcinoid carcinoma, head and neck cancer, B-cell lymphoma (including non-Hodgkin's lymphoma, as well as low grade/follicular non-Hodgkin's lymphoma (NHL), small lymphocytic (SL) NHL, intermediate grade/follicular NHL, intermediate grade diffuse NHL, Diffuse Large B cell lymphoma, high grade immunoblastic NHL, high grade lymphoblastic NHL, high grade small non-cleaved cell NHL, bulky disease NHL, mantle cell lymphoma, AIDS-related lymphoma, and Waldenström's Macroglobulinemia), Hodgkin's lymphoma (HD), chronic lymphocytic leukemia (CLL), acute lymphoblastic leukemia (ALL), T cell Acute Lymphoblastic Leukemia (T-ALL), Acute myeloid leukemia (AML), Hairy cell leukemia, chronic myeloblastic leukemia, multiple myeloma, post-transplant lymphoproliferative disorder (PTLD), abnormal vascular proliferation associated with phakomatoses, Meigs' syndrome, Merkel Cells cancer, MSI-high cancer, KRAS mutant tumors, adult T-cell leukemia/lymphoma, adenoid cystic cancer (including adenoid cystic carcinoma), malignant melanoma, pancreatic cancer, pancreatic adenocarcinoma, ovarian cancer (including ovarian carcinoma), pleural mesothelioma, neuroendocrine lung cancer (including pleural mesothelioma, neuroendocrine lung carcinoma), NSCL (large cell), NSCLC large cell adenocarcinoma, non-small cell lung carcinoma (NSCLC), NSCLC squamous cell, cervical squamous cell carcinoma (cervical SCC), anal squamous cell carcinoma (anal SCC), neuroendocrine lung carcinoma, carcinoma of unknown primary, gallbladder cancer, malignant melanoma, pleural mesothelioma, Myelodysplastic syndromes (MDS), HNSCC, PD1 refractory or relapsing cancer, gastroesophageal junction cancer, gastric cancer, and/or fallopian tube cancer.

[0839] In some embodiments, the PVRL2, DNAM-1, and/or PVRIG biomarkers can be used for determining, modifying, altering, and/or predicting the outcome for a cancer selected from the group consisting of prostate cancer, liver cancer (HCC), colorectal cancer (CRC), colorectal cancer MSS (MSS-CRC; including refractory MSS colorectal), CRC (MSS unknown), ovarian cancer (including ovarian carcinoma), endometrial cancer (including endometrial carcinoma), breast cancer, pancreatic cancer, stomach cancer, cervical cancer, head and neck cancer, thyroid cancer, testis cancer, urothelial cancer, lung cancer, melanoma, non-melanoma skin cancer (squamous and basal cell carcinoma), glioma, renal cell cancer (RCC), renal cell carcinoma (RCC), lymphoma (non-Hodgkins' lymphoma (NHL) and Hodgkin's lymphoma (HD)), Acute myeloid leukemia (AML), T cell Acute Lymphoblastic Leukemia (T-ALL), Diffuse Large B cell lymphoma, testicular germ cell tumors, mesothelioma, esophageal cancer, triple negative breast cancer, Merkel Cells cancer, MSI-high cancer, KRAS mutant tumors, adult T-cell leukemia/lymphoma, pleural mesothelioma, anal SCC, neuroendocrine lung cancer (including neuroendocrine lung carcinoma), NSCLC, NSCL (large cell), NSCLC large cell, NSCLC squamous cell, cervical SCC, malignant melanoma, pancreatic cancer, pancreatic adenocarcinoma, adenoid cystic cancer (including adenoid cystic carcinoma), primary peritoneal cancer, microsatellite stable primary peritoneal cancer, platinum resistant microsatellite stable primary peritoneal cancer, Myelodysplastic syndromes (MDS), HNSCC, PD1 refractory or relapsing cancer, gastroesophageal junction cancer, gastric cancer, and/or fallopian tube cancer.

[0840] In some embodiments, the PVRL2 biomarker can be used for determining, modifying, altering, and/or predicting the outcome for a cancer selected from the group consisting of prostate cancer, liver cancer (HCC), colorectal cancer (CRC), colorectal cancer MSS (MSS-CRC; including refractory MSS colorectal), CRC (MSS unknown), ovarian cancer (including ovarian carcinoma), endometrial cancer (including endometrial carcinoma), breast cancer, pancreatic cancer, stomach cancer, cervical cancer, head and neck cancer, thyroid cancer, testis cancer, urothelial cancer, lung cancer, melanoma, non-melanoma skin cancer (squamous and basal cell carcinoma), glioma, renal cell cancer (RCC), renal cell carcinoma (RCC), lymphoma (non-Hodgkins' lymphoma (NHL) and Hodgkin's lymphoma (HD)), Acute myeloid leukemia (AML), T cell Acute Lymphoblastic Leukemia (T-ALL), Diffuse Large B cell lymphoma, testicular germ cell tumors, mesothelioma, esophageal cancer, triple negative breast cancer, Merkel Cells cancer, MSI-high cancer, KRAS mutant tumors, adult T-cell leukemia/lymphoma, pleural mesothelioma, anal SCC, neuroendocrine lung cancer (including neuroendocrine lung carcinoma), NSCLC, NSCL (large cell), NSCLC large cell, NSCLC squamous cell, cervical SCC, malignant melanoma, pancreatic cancer, pancreatic adenocarcinoma, adenoid cystic cancer (including adenoid cystic carcinoma), primary peritoneal cancer, microsatellite stable primary peritoneal cancer, platinum resistant microsatellite stable primary peritoneal cancer, Myelodysplastic syndromes (MDS), HNSCC, PD1 refractory or relapsing cancer, gastroesophageal junction cancer, gastric cancer, and/or fallopian tube cancer.

[0841] In some embodiments, the PVRIG biomarker can be used for determining, modifying, altering, and/or predicting the outcome for a cancer selected from the group consisting of prostate cancer, liver cancer (HCC), colorectal cancer (CRC), colorectal cancer MSS (MSS-CRC; including refractory MSS colorectal), CRC (MSS unknown), ovarian cancer (including ovarian carcinoma), endometrial cancer (including endometrial carcinoma), breast cancer, pancreatic cancer, stomach cancer, cervical cancer, head and neck cancer, thyroid cancer, testis cancer, urothelial cancer, lung cancer, melanoma, non-melanoma skin cancer (squamous and basal cell carcinoma), glioma, renal cell cancer (RCC), renal cell carcinoma (RCC), lymphoma (non-Hodgkins' lymphoma (NHL) and Hodgkin's lymphoma (HD)), Acute myeloid leukemia (AML), T cell Acute Lymphoblastic Leukemia (T-ALL), Diffuse Large B cell lymphoma, testicular germ cell tumors, mesothelioma, esophageal cancer, triple negative breast cancer, Merkel Cells cancer, MSI-high cancer, KRAS mutant tumors, adult T-cell leukemia/lymphoma, pleural mesothelioma, anal SCC, neuroendocrine lung cancer (including neuroendocrine lung carcinoma), NSCLC, NSCL (large cell), NSCLC large cell, NSCLC squamous cell, cervical SCC, malignant melanoma, pancreatic cancer, pancreatic adenocarcinoma, adenoid cystic cancer (including adenoid cystic carcinoma), primary peritoneal cancer, microsatellite stable primary peritoneal cancer, platinum resistant microsatellite stable primary peritoneal cancer, Myelodysplastic syndromes (MDS), HNSCC, PD1 refractory or relapsing cancer, gastroesophageal junction cancer, gastric cancer, and/or fallopian tube cancer), HNSCC, PD1 refractory or relapsing cancer, gastroesophageal junction cancer, gastric cancer, and/or fallopian tube cancer.

[0842] In some embodiments, the DNAM-1 biomarker can be used for determining, modifying, altering, and/or predicting the outcome for a cancer selected from the group consisting of prostate cancer, liver cancer (HCC), colorectal cancer (CRC), colorectal cancer MSS (MSS-CRC; including refractory MSS colorectal), CRC (MSS unknown), ovarian cancer (including ovarian carcinoma), endometrial cancer (including endometrial carcinoma), breast cancer, pancreatic cancer, stomach cancer, cervical cancer, head and neck cancer, thyroid cancer, testis cancer, urothelial cancer, lung cancer, melanoma, non-melanoma skin cancer (squamous and basal cell carcinoma), glioma, renal cell cancer (RCC), renal cell carcinoma (RCC), lymphoma (non-Hodgkins' lymphoma (NHL) and Hodgkin's lymphoma (HD)), Acute myeloid leukemia (AML), T cell Acute Lymphoblastic Leukemia (T-ALL), Diffuse Large B cell lymphoma, testicular germ cell tumors, mesothelioma, esophageal cancer, triple negative breast cancer, Merkel Cells cancer, MSI-high cancer, KRAS mutant tumors, adult T-cell leukemia/lymphoma, pleural mesothelioma, anal SCC, neuroendocrine lung cancer (including neuroendocrine lung carcinoma), NSCLC, NSCL (large cell), NSCLC large cell, NSCLC squamous cell, cervical SCC, malignant melanoma, pancreatic cancer, pancreatic adenocarcinoma, adenoid cystic cancer (including adenoid cystic carcinoma), primary peritoneal cancer, microsatellite stable primary peritoneal cancer, platinum resistant microsatellite stable primary peritoneal cancer, Myelodysplastic syndromes (MDS), HNSCC, PD1 refractory or relapsing cancer, gastroesophageal junction cancer, gastric cancer, and/or fallopian tube cancer.

### VII. Formulations of Anti-PVRIG Antibodies

[0843] The anti-PVRIG antibodies and/or antigen binding portions thereof compositions (e.g., anti-PVRIG antibodies including those with CDRs identical to those shown in FIG. 3) can be formulated into pharmaceutical compositions comprising a carrier suitable for the desired delivery method. Suitable carriers include any material that when combined with the therapeutic composition retains the anti-tumor function of the therapeutic composition and is generally non-reactive with the patient's immune system. Examples include, but are not limited to, any of a number of standard pharmaceutical carriers such as sterile phosphate buffered saline solutions, bacteriostatic water, and the like (see, generally, Remington's Pharmaceutical Sciences 16^{th} Edition, A. Osal., Ed., 1980). Acceptable carriers, excipients, or stabilizers are nontoxic to recipients at the dosages and concentrations employed, and include buffers such as phosphate, citrate, acetate, and other organic acids; antioxidants including ascorbic acid and methionine; preservatives (such as octadecyldimethylbenzyl ammonium chloride; hexamethonium chloride; benzalkonium chloride, benzethonium chloride; phenol, butyl orbenzyl alcohol; alkyl parabens such as methyl or propyl paraben; catechol; resorcinol; cyclohexanol; 3-pentanol; and m-cresol); low molecular weight (less than about 10 residues) polypeptides; proteins, such as serum albumin, gelatin, or immunoglobulins; hydrophilic polymers such as polyvinylpyrrolidone; amino acids such as glycine, glutamine, asparagine, histidine, arginine, or lysine; monosaccharides, disaccharides, and other carbohydrates including glucose, mannose, or dextrins; chelating agents such as EDTA; sugars such as sucrose, mannitol, trehalose or sorbitol; sweeteners and other flavoring agents; fillers such as microcrystalline cellulose, lactose, corn and other starches; binding agents; additives; coloring agents; salt-forming counter-ions such as sodium; metal complexes (e.g., Zn-protein complexes); and/or non-ionic surfactants such as TWEEN™, PLURONICS™, or polyethylene glycol (PEG).

[0844] In a preferred embodiment, the pharmaceutical composition that comprises anti-PVRIG antibodies including those with CDRs identical to those shown in FIG. 3) of the invention may be in a water-soluble form, such as being present as pharmaceutically acceptable salts, which is meant to include both acid and base addition salts. “Pharmaceutically acceptable acid addition salt” refers to those salts that retain the biological effectiveness of the free bases and that are not biologically or otherwise undesirable, formed with inorganic acids such as hydrochloric acid, hydrobromic acid, sulfuric acid, nitric acid, phosphoric acid and the like, and organic acids such as acetic acid, propionic acid, glycolic acid, pyruvic acid, oxalic acid, maleic acid, malonic acid, succinic acid, fumaric acid, tartaric acid, citric acid, benzoic acid, cinnamic acid, mandelic acid, methanesulfonic acid, ethanesulfonic acid, p-toluenesulfonic acid, salicylic acid and the like. “Pharmaceutically acceptable base addition salts” include those derived from inorganic bases such as sodium, potassium, lithium, ammonium, calcium, magnesium, iron, zinc, copper, manganese, aluminum salts and the like. Particularly preferred are the ammonium, potassium, sodium, calcium, and magnesium salts. Salts derived from pharmaceutically acceptable organic non-toxic bases include salts of primary, secondary, and tertiary amines, substituted amines including naturally occurring substituted amines, cyclic amines and basic ion exchange resins, such as isopropylamine, trimethylamine, diethylamine, triethylamine, tripropylamine, and ethanolamine. The formulations to be used for in vivo administration are preferrably sterile. This is readily accomplished by filtration through sterile filtration membranes or other methods.

[0845] As used herein, the term “activity” refers to a functional activity or activities of anti-PVRIG antibodies and/or antigen binding portions thereof. Functional activities include, but are not limited to, biological activity and/or binding affinity.

[0846] As used herein, the term “stability” is used in a structural context, e.g., relating to the structural integrity of an anti-PVRIG antibody and/or antigen binding portion thereof, or in a functional context, e.g., relating to a an anti-PVRIG antibody and/or antigen binding portion thereof's ability to retain its function and/or activity over time (e.g., including anti-PVRIG antibody and/or antigen binding portion thereof stability or anti-PVRIG antibody and/or antigen binding portion thereof formulation stability, wherein the anti-PVRIG antibody includes those with CDRs identical to those shown in FIG. 3). As will be appreciated, the an anti-PVRIG antibody and/or antigen binding portion thereof under discussion may be contained within a formulation in accordance with the methods and compositions described herein, and the stability of that protein refers to its stability in that formulation. In some embodiments, the stability of an anti-PVRIG antibody and/or antigen binding portion thereof composition is determined by measuring the binding activity of the composition, including for example, using the assays described in the application and figures provided herewith, as well as other applicable assays known in the art. In some embodiments, the stability of an anti-PVRIG antibody and/or antigen binding portion thereof composition is formulated with sugar, sugar alcohol, and/or non-ionic surfactant, as described herein, is compared to an anti-PVRIG antibody and/or antigen binding portion thereof composition formulated without the at least one amino acid, salt, and/or non-ionic surfactant and/or with a different combination of components. In some embodiments, the formulation does not comprise a sugar and/or sugar alcohol.

[0847] As used herein, a “storage stable” aqueous an anti-PVRIG antibody and/or antigen binding portion thereof composition refers to a an anti-PVRIG antibody and/or antigen binding portion thereof comprising solution that has been formulated to increase the stability of the protein in solution, for example by at least 10%, over a given storage time. In the context of the present disclosure, an anti-PVRIG antibody and/or antigen binding portion thereof can be made “storage stable” by the addition of at least one amino acid, salt, or non-ionic surfactant as a stabilizing agent. In some embodiments, the stability of the an anti-PVRIG antibody and/or antigen binding portion thereof in any given formulation can be measured, for example, by monitoring the formation of aggregates, loss of bulk binding activity, or formation of degradation products, over a period of time. The absolute stability of a formulation, and the stabilizing effects of the sugar, sugar alcohol, or non-ionic surfactant, will vary dependent upon the particular composition being stabilized. In one embodiment, the stability of an anti-PVRIG antibody and/or antigen binding portion thereof composition is determined by measuring the anti-PVRIG antibody and/or antigen binding portion thereof binding activity of the composition. For example, by using an ELISA or other binding activity assay. In one embodiment, the stability of an anti-PVRIG antibody and/or antigen binding portion thereof composition formulated with sugar, sugar alcohol, and/or non-ionic surfactant, as described herein, is compared to an anti-PVRIG antibody and/or antigen binding portion thereof composition formulated without the a least one amino acid, salt, and/or non-ionic surfactant and/or with a different combination of components. In some embodiments, the formulation does not comprise a sugar and/or sugar alcohol.

[0848] As used herein, “shelf-life” refers to the period of time a formulation maintains a predetermined level of stability at a predetermined temperature. In particular embodiments, the predetermined temperature refers to frozen (e.g., −80° C., −25° C., 0° C.), refrigerated (e.g., 0° to 10° C.), or room temperature (e.g., 18° C. to 32° C.) storage.

[0849] As used herein, the term “time of stability” refers to the length of time a formulation is considered stable. For example, the time of stability for a formulation may refer to the length of time for which the level of protein aggregation and/or degradation in the formulation remains below a certain threshold (e.g., 1%, 2%, 3%, 4%, 5%, 6%, 7%, 8%, 9%, 10%, 11%, 12%, 13%, 14%, 15%, 16%, 17%, 18%, 19%, 20%, etc.), and/or the length of time a formulation maintains biological activity above a certain threshold (e.g., 100%, 95%, 90%, 85%, 80%, 75%, 70%, 65%, 60%, 55%, 50%, etc.) of the amount of activity (including, for example, binding activity) present in the formulation at the start of the storage period.

[0850] In the context of the present disclosure, a storage stable aqueous composition of a an anti-PVRIG antibody and/or antigen binding portion thereof formulated with a sugar, sugar alcohol, and/or non-ionic surfactant will have a longer time of stability than a composition of the same an anti-PVRIG antibody and/or antigen binding portion thereof formulated without the at least one amino acid, salt, and/or non-ionic surfactant. In some embodiments, a storage stable aqueous composition of an anti-PVRIG antibody and/or antigen binding portion thereof, will have a time of stability that is, for example, at least 10% greater than the time of stability for the an anti-PVRIG antibody and/or antigen binding portion thereof composition formulated in the absence of the at least one amino acid, salt, and/or non-ionic surfactant, or at least 15%, 20%, 25%, 30%, 35%, 40%, 45%, 50%, 55%, 60%, 65%, 70%, 75%, 80%, 85%, 90%, 95%, 100%, 110%, 120%, 130%, 140%, 150%, 160%, 170%, 180%, 190% greater, or at least 2 times greater, or at least 2.5 times, 3.0 times, 3.5 times, 4.0 times, 4.5 times, 5.0 times, 5.5 times, 6.0 times, 6.5 times, 7.0 times, 7.5 times, 8.0 times, 8.5 times, 9.0 times, 9.5 times, 10 times, or more times greater than the time of stability for the an anti-PVRIG antibody and/or antigen binding portion thereof composition formulated in the absence of the at least amino acid, salt, and/or non-ionic surfactant.

[0851] As used herein, “BDS” refers to “Bulk Drug Substance.”

[0852] A. Stabilized Liquid Formulations

[0853] In some embodiments, the present disclosure provides stabilized aqueous formulations of an anti-PVRIG antibody and/or antigen binding portion thereof (e.g., anti-PVRIG antibodies including those with CDRs identical to those shown in FIG. 3). The following embodiments are based in part on the discovery that inclusion of at least one amino acid, salt, and/or non-ionic surfactant stabilizes the liquid anti-PVRIG antibody and/or antigen binding portion thereof compositions, as compared to compositions lacking the at least one amino acid, salt, and/or non-ionic surfactant. In some embodiments, the formulation does not comprise a sugar and/or sugar alcohol.

[0854] As will be recognized by one of skill in the art, an anti-PVRIG antibody and/or antigen binding portion thereof formulated according to the embodiments provided herein may contain, in addition to the components explicitly disclosed, counter ions contributed by the inclusion of solution components or pH modifying agents, for example, sodium or potassium contributed from an acetate salt, sodium hydroxide, or potassium hydroxide or chloride contributed by calcium chloride or hydrochloric acid. In the context of the present disclosure, a storage stable an anti-PVRIG antibody and/or antigen binding portion thereof composition consisting of or consisting essentially of a given formulation may further comprise one or more counter ion, as necessitated by the formulation process at a particular pH.

[0855] In one embodiment, a storage stable anti-PVRIG antibody and/or antigen binding portion provided herein will be stabilized at refrigerated temperature (i.e., between 2° C. and 10° C.) for a period of time. For example, in one embodiment, a stable liquid pharmaceutical formulations comprising an anti-PVRIG antibody or antigen binding fragment thereof will be stable when stored at refrigerated temperature for at least 4 days. In other embodiments, the anti-PVRIG antibody and/or antigen binding portion composition will be stable at refrigerated temperature for at least 1, 2, 3, 4, 5, 6, 7, 8, 9, 10, 11, 12, 13, 14, 21, 28, or more days. In some embodiments, the anti-PVRIG antibody and/or antigen binding portion composition will be stable for at least 1 week, 2 weeks, 3 weeks, 4 weeks, 5 weeks, 6 weeks, 7 weeks, 8 weeks, 9 weeks, 10 weeks, or more. In some embodiments, the anti-PVRIG antibody and/or antigen binding portion composition will be stable for at least 1 month. In some embodiments, the composition will be stable for at least 2, 3, 4, 5, 6, 7, 8, 9, 10, 11, 12, 13, 14, 15, 16, 17, 18, 19, 20, 21, 22, 23, 24, 25, 26, 27, 28, 29, 30, 31, 32, 33, 34, 35, 36, 37, 38, 39, 40, 41, 42, 43, 44, 45, 46, 47, 48, or more months. In some embodiments, the anti-PVRIG antibody and/or antigen binding portion composition will be stable for an extended period of time when stored at a temperature between 2° C. and 8° C.

[0856] In one embodiment, a stable liquid pharmaceutical formulations comprising an anti-PVRIG antibody or antigen binding fragment thereof provided herein will be stabilized at room temperature (i.e., between 18° C. and 32° C.) for a period of time. For example, in one embodiment, a stable liquid pharmaceutical formulations comprising an anti-PVRIG antibody or antigen binding fragment thereof will be stable when stored at room temperature for at least 4 days. In some embodiments, the anti-PVRIG antibody and/or antigen binding portion composition will be stable at room temperature for at least 1, 2, 3, 4, 5, 6, 7, 8, 9, 10, 11, 12, 13, 14, 21, 28, or more days. In some embodiments, the anti-PVRIG antibody and/or antigen binding portion composition will be stable for at least 1 week, 2 weeks, 3 weeks, 4 weeks, 5 weeks, 6 weeks, or more. In some embodiments, the anti-PVRIG antibody and/or antigen binding portion composition will be stable for at least 1 month. In yet other embodiments, the composition will be stable for at least 2, 3, 4, 5, 6, 7, 8, 9, 10, 11, 12, 13, 14, 15, 16, 17, 18, 19, 20, 21, 22, 23, 24, 25, 26, 27, 28, 29, 30, 31, 32, 33, 34, 35, 36, 37, 38, 39, 40, 41, 42, 43, 44, 45, 46, 47, 48, or more months. In some embodiments, room temperature refers to between 20° C. and 30° C., between 21° C. and 29° C., between 22° C. and 28° C., between 23° C. and 27° C., between 24° C. and 26° C., or about 25° C. In some embodiments, the anti-PVRIG antibody and/or antigen binding portion composition will be stable for an extended period of time when stored at a temperature between 20° C. and 25° C. In some embodiments, the anti-PVRIG antibody and/or antigen binding portion composition will be stable for an extended period of time when stored at a temperature of about 25° C.

[0857] In one embodiment, a storage stable anti-PVRIG antibody and/or antigen binding portion provided herein will be stabilized at elevated temperature (i.e., between 32° C. and 42° C.) for a period of time. For example, in one embodiment, a stable liquid pharmaceutical formulations comprising an anti-PVRIG antibody or antigen binding fragment thereof will be stable when stored at elevated temperature for at least 4 days. In some embodiments, the anti-PVRIG antibody and/or antigen binding portion composition will be stable at elevated temperature for at least 1, 2, 3, 4, 5, 6, 7, 8, 9, 10, 11, 12, 13, 14, 21, 28, or more days. In some embodiments, the anti-PVRIG antibody and/or antigen binding portion composition will be stable for at least 1 week, 2 weeks, 3 weeks, 4 weeks, 5 weeks, or more. In some embodiments, the anti-PVRIG antibody and/or antigen binding portion composition will be stable for at least 1 month. In yet other embodiments, the anti-PVRIG antibody and/or antigen binding portion composition will be stable for at least 2, 3, 4, 5, 6, 7, 8, 9, 10, 11, 12, 13, 14, 15, 16, 17, 18, 19, 20, 21, 22, 23, 24, 25, 26, 27, 28, 29, 30, 31, 32, 33, 34, 35, 36, 37, 38, 39, 40, 41, 42, 43, 44, 45, 46, 47, 48, or more months. In some embodiments, the anti-PVRIG antibody and/or antigen binding portion composition will be stable for an extended period of time when stored at a temperature between 35° C. and 40° C.

[0858] In one embodiment, a stored anti-PVRIG antibody and/or antigen binding portion composition is considered storage stable as long as the composition maintains at least 40% of the antibody binding activity present at the start of the storage period (e.g., at time=0). In another embodiment, a stored composition is considered stable as long as the composition maintains at least 45%, 50%, 55%, 60%, 65%, 70%, 75%, 80%, 85%, 90%, 95% or more of the antibody binding activity present at the start of the storage period (e.g., at time=0). In one embodiment, antibody binding activity is measure using any assay known in the art.

[0859] In some embodiments, an anti-PVRIG antibody and/or antigen binding portion composition is considered to have been stabilized by the addition of a stabilizing agent (e.g., at least one amino acid, salt, and/or non-ionic surfactant) when the anti-PVRIG antibody and/or antigen binding portion composition contains at least 10% more antibody binding activity after storage for a period of time, as compared to an anti-PVRIG antibody and/or antigen binding portion composition not containing the stabilizing agent or containing a lower amount of the stabilizing agent. In other embodiments, an anti-PVRIG antibody and/or antigen binding portion composition is considered to have been stabilized by the addition of a stabilizing agent (e.g., at least one amino acid, salt, and/or non-ionic surfactant) when the composition contains at least 15%, 20%, 25%, 30%, 35%, 40%, 45%, 50%, 55%, 60%, 65%, 70%, 75%, 80%, 85%, 90%, 95%, 100%, or a greater percentage more anti-PVRIG antibody and/or antigen binding portion activity after storage for a period of time, as compared to an anti-PVRIG antibody and/or antigen binding portion composition not containing the stabilizing agent or containing a lower amount of the stabilizing agent.

[0860] In one embodiment, a stored anti-PVRIG antibody and/or antigen binding portion composition is considered stable as long as the percentage of anti-PVRIG antibody and/or antigen binding portion present in an aggregated state remains no more than 50%. In some embodiments, a stored anti-PVRIG antibody and/or antigen binding portion thereof composition is considered stable as long as the percentage of the anti-PVRIG antibody and/or antigen binding portion thereof present in an aggregated state remains no more than 45%, 40%, 35%, 30%, 25%, 24%, 23%, 22%, 21%, 20%, 19%, 18%, 17%, 16%, 15%, 14%, 13%, 12%, 11%, %, 9%, 8%, 7%, 6%, 5%, 4%, 3%, 2%, 1%, or less.

[0861] In some embodiments, an anti-PVRIG antibody and/or antigen binding portion composition is considered to have been stabilized by the addition of a stabilizing agent (anti-PVRIG antibody and/or antigen binding portion composition, at least one amino acid, salt, and/or non-ionic surfactant) when the composition contains at least 10% less anti-PVRIG antibody and/or antigen binding portion present in an aggregated state after storage for a period of time, as compared to an anti-PVRIG antibody and/or antigen binding portion composition not containing the stabilizing agent or containing a lower amount of the stabilizing agent. In other embodiments, an anti-PVRIG antibody and/or antigen binding portion composition is considered to have been stabilized by the addition of a stabilizing agent (e.g., at least one amino acid, salt, and/or non-ionic surfactant) when the composition contains at least 15%, 20%, 25%, 30%, 35%, 40%, 45%, 50%, 55%, 60%, 65%, 70%, 75%, 80%, 85%, 90%, 95%, 100%, or a greater percentage less anti-PVRIG antibody and/or antigen binding portion present in an aggregated state after storage for a period of time, as compared to an anti-PVRIG antibody and/or antigen binding portion composition not containing the stabilizing agent or containing a lower amount of the stabilizing agent

[0862] In some embodiments, a stored anti-PVRIG antibody and/or antigen binding portion composition is considered stable as long as the composition maintains at least 40% of the starting binding activity (e.g., at time=0) after being subjected to mechanical stress. In another embodiment, a stored composition is considered stable as long as the composition maintains 45%, 50%, 55%, 60%, 65%, 70%, 75%, 80%, 85%, 90%, 95% or more of the starting binding activity (e.g., at time=0) after being subjected to mechanical stress. In some embodiments, the mechanical stress is agitation (e.g., shaking).

[0863] In some embodiments, an anti-PVRIG antibody and/or antigen binding portion composition is considered to have been stabilized by the addition of a stabilizing agent (e.g., at least one amino acid, salt, or non-ionic surfactant) when the anti-PVRIG antibody and/or antigen binding portion composition contains at least 10% more binding activity after being subjected to mechanical stress, as compared to an anti-PVRIG antibody and/or antigen binding portion composition not containing the stabilizing agent or containing a lower amount of the stabilizing agent. In other embodiments, an anti-PVRIG antibody and/or antigen binding portion composition is considered to have been stabilized by the addition of a stabilizing agent (e.g., a sugar, sugar alcohol, or non-ionic surfactant) when the composition contains at least 15%, 20%, 25%, 30%, 35%, 40%, 45%, 50%, 55%, 60%, 65%, 70%, 75%, 80%, 85%, 90%, 95%, 100%, or a greater percentage more antibody activity after being subjected to mechanical stress, as compared to an anti-PVRIG antibody and/or antigen binding portion composition not containing the stabilizing agent or containing a lower amount of the stabilizing agent. In a specific embodiment, the mechanical stress is agitation (e.g., shaking).

[0864] In some embodiments, a stored anti-PVRIG antibody and/or antigen binding portion composition is considered stable as long as the percentage of anti-PVRIG antibody and/or antigen binding portion present in an aggregated state remains no more than 50% after being subjected to mechanical stress. In other embodiments, a stored anti-PVRIG antibody and/or antigen binding portion composition is considered stable as long as the percentage of anti-PVRIG antibody and/or antigen binding portion present in an aggregated state remains no more than 45%, 40%, 35%, 30%, 25%, 24%, 23%, 22%, 21%, 20%, 19%, 18%, 17%, 16%, 15%, 14%, 13%, 12%, 11%, 10%, 9%, 8%, 7%, 6%, 5%, 4%, 3%, 2%, 1%, or less after being subjected to mechanical stress. In some embodiments, the mechanical stress is agitation (e.g., shaking).

[0865] In some embodiments, an anti-PVRIG antibody and/or antigen binding portion composition is considered to have been stabilized by the addition of a stabilizing agent (e.g., at least one amino acid, salt, or non-ionic surfactant) when the composition contains at least 10% less anti-PVRIG antibody and/or antigen binding portion present in an aggregated state after being subjected to mechanical stress, as compared to an anti-PVRIG antibody and/or antigen binding portion composition not containing the stabilizing agent or containing a lower amount of the stabilizing agent. In some embodiments, an anti-PVRIG antibody and/or antigen binding portion composition is considered to have been stabilized by the addition of a stabilizing agent (e.g., at least one amino acid, salt, or non-ionic surfactant) when the composition contains at least 15%, 20%, 25%, 30%, 35%, 40%, 45%, 50%, 55%, 60%, 65%, 70%, 75%, 80%, 85%, 90%, 95%, 100%, or a greater percentage less anti-PVRIG antibody and/or antigen binding portion present in an aggregated state after being subjected to mechanical stress, as compared to an anti-PVRIG antibody and/or antigen binding portion composition not containing the stabilizing agent or containing a lower amount of the stabilizing agent. In a specific embodiment, the mechanical stress is agitation (e.g., shaking).

[0866] In some embodiments, the highly stabilized formulations of the invention have a shelf life of at least 6 months. As will be appreciated, this shelf life may be at frozen temperatures (i.e., −80° C., −25° C., 0° C.), refrigerated (0° C. to 10° C.), or room temperature (20° C. to 32° C.) in liquid or lyophilized form. In further aspects, the highly stabilized formulations of the invention have a shelf life of at least 12, 18, 24, 30, 36, 42, 48, 54, or 60 months.

[0867] In some embodiments, shelf life is determined by a percent activity remaining after storage at any of the above temperatures for any of the above periods of time. In some embodiments, shelf life means that the formulation retains at least 10%, 15%, 20%, 25%, 30%, 35%, 40%, 45%, 50%, 55%, 60%, 65%, 70%, 75%, 80%, 85%, 90%, 95%, 96%, 97%, 98%, 99%, 100% of antibody activity as measured by any of the assays described herein or known in the art as compared to activity prior to storage for any of the above amounts of time at any of the above temperatures.

[0868] In some embodiments, the present invention provides a stable liquid pharmaceutical formulation of an anti-PVRIG antibody comprising:
[0869] (a) an anti-PVRIG antibody, wherein the anti-PVRIG antibody comprises an antibody with CDRs identical to those shown in FIG. 3;
[0870] (b) 25 mM histidine;
[0871] (c) 60 mM NaCl;
[0872] (d) 100 mM L-Arginine, and
[0873] (e) 0.01% w/v polysorbate 80,
[0874] wherein the composition has a pH from 5.5 to 7.0.

[0875] In some embodiments, the anti-PVRIG antibody is at a concentration of from 10 mg/mL to 40 mg/mL, 15 mg/mL to 40 mg/mL, 15 mg/mL to 30 mg/mL, 10 mg/mL to 25 mg/mL, or 15 mg/mL to 25 mg/mL. In some embodiments, the anti-PVRIG antibody is at a concentration of from 10 mg/mL to 40 mg/mL. In some embodiments, the anti-PVRIG antibody is at a concentration of from 15 mg/mL to 40 mg/mL. In some embodiments, the anti-PVRIG antibody is at a concentration of from 15 mg/mL to 30 mg/mL. In some embodiments, the anti-PVRIG antibody is at a concentration of from 10 mg/mL to 25 mg/mL. In some embodiments, the anti-PVRIG antibody is at a concentration of from 15 mg/mL to 25 mg/mL. In some embodiments, the anti-PVRIG antibody is at a concentration of from 10 mg/mL to 25 mg/mL. In some embodiments, the anti-PVRIG antibody is at a concentration of from 15 mg/mL to 25 mg/mL. In some embodiments, the anti-PVRIG antibody is at a concentration of from 20 mg/mL to 25 mg/mL. In some embodiments, the anti-PVRIG antibody is at a concentration of about 20 mg/mL.

[0876] In some embodiments, the present invention provides a stable liquid pharmaceutical formulation of an anti-PVRIG antibody comprising:
[0877] (a) an anti-PVRIG antibody, wherein the anti-PVRIG antibody comprises an antibody with CDRs identical to those shown in FIG. 3;
[0878] (b) from 10 mM to 100 mM histidine;
[0879] (c) from 30 mM to 100 mM NaCl;
[0880] (d) from 20 mM to 150 mM L-Arginine, and
[0881] (e) from 0.005% to 0.1% w/v polysorbate 80 wherein the composition has a pH from 5.5 to 7.0.

[0882] B. Amino Acids

[0883] In some embodiments, the present invention provides a stable liquid pharmaceutical formulation of an anti-PVRIG antibody or antigen binding fragment thereof (e.g., anti-PVRIG antibodies including those with CDRs identical to those shown in FIG. 3) comprising at least one amino acid. In some embodiments, the at least one amino acid is histidine. In some embodiments, the at least one amino acid is arginine. In some embodiments, the present invention provides a stable liquid pharmaceutical formulation of an anti-PVRIG antibody or antigen binding fragment thereof comprising at least two amino acids. In some embodiments, the at least two amino acids are histidine and arginine.

[0884] In some embodiments, the pharmaceutical formulation comprises from 10 mM to 80 mM histidine, from 15 mM to 70 mM histidine, from 20 mM to 60 mM histidine, from 20 mM to 50 mM histidine, or from 20 mM to 30 mM histidine. In some embodiments, the pharmaceutical formulation comprises from 10 mM to 80 mM histidine. In some embodiments, the pharmaceutical formulation comprises from 15 mM to 70 mM histidine. In some embodiments, the pharmaceutical formulation comprises from 20 mM to 60 mM histidine. In some embodiments, the pharmaceutical formulation comprises from 20 mM to 50 mM histidine. In some embodiments, the pharmaceutical formulation comprises from 20 mM to 30 mM histidine. In some embodiments, the pharmaceutical formulation comprises about 25 mM histidine.

[0885] In some embodiments, the pharmaceutical formulation comprises from 10 mM to 80 mM histidine. In some embodiments, the pharmaceutical formulation comprises from 15 mM to 70 mM histidine. In some embodiments, the pharmaceutical formulation comprises from 20 mM to 60 mM histidine. In some embodiments, the pharmaceutical formulation comprises from 20 mM to 50 mM histidine. In some embodiments, the pharmaceutical formulation comprises from 20 mM to 30 mM histidine. In some embodiments, the pharmaceutical formulation comprises about 25 mM histidine.

[0886] In some embodiments, the pharmaceutical formulation comprises from 20 mM to 140 mM L-arginine, from 30 mM to 140 mM L-arginine, from 40 mM to 130 mM L-arginine, from 50 mM to 120 mM L-arginine, from 60 mM to 110 mM L-arginine, from 70 mM to 110 mM L-arginine, from 80 mM to 110 mM L-arginine, or from 90 mM to 110 mM L-arginine. In some embodiments, the pharmaceutical formulation comprises from 20 mM to 140 mM L-arginine, from 30 mM to 140 mM L-arginine, from 40 mM to 130 mM L-arginine, from 50 mM to 120 mM L-arginine, from 60 mM to 110 mM L-arginine, from 70 mM to 110 mM L-arginine, from 80 mM to 110 mM L-arginine, or from 90 mM to 110 mM L-arginine.

[0887] In some embodiments, the pharmaceutical formulation comprises from 20 mM to 140 mM L-arginine. In some embodiments, the pharmaceutical formulation comprises from 30 mM to 140 mM L-arginine. In some embodiments, the pharmaceutical formulation comprises from 40 mM to 130 mM L-arginine. In some embodiments, the pharmaceutical formulation comprises from 50 mM to 120 mM L-arginine. In some embodiments, the pharmaceutical formulation comprises from 60 mM to 110 mM L-arginine. In some embodiments, the pharmaceutical formulation comprises from 70 mM to 110 mM L-arginine. In some embodiments, the pharmaceutical formulation comprises from 80 mM to 110 mM L-arginine. In some embodiments, the pharmaceutical formulation comprises from 90 mM to 110 mM L-arginine. In some embodiments, the pharmaceutical formulation comprises about 100 mM L-arginine.

[0888] C. Sugar and/or Sugar Alcohol

[0889] In some embodiments, the present invention provides a stable liquid pharmaceutical formulation of an anti-PVRIG antibody or antigen binding fragment thereof (e.g., anti-PVRIG antibodies including those with CDRs identical to those shown in FIG. 3) comprising no sugar and/or sugar alcohol. In some embodiments, the present invention provides a stable liquid pharmaceutical formulation of an anti-PVRIG antibody or antigen binding fragment thereof (e.g., anti-PVRIG antibodies including those with CDRs identical to those shown in FIG. 3) comprising no sugar. In some embodiments, the present invention provides a stable liquid pharmaceutical formulation of an anti-PVRIG antibody or antigen binding fragment thereof (e.g., anti-PVRIG antibodies including those with CDRs identical to those shown in FIG. 3) comprising no sugar alcohol.

[0890] In some embodiments, the present invention provides a stable liquid pharmaceutical formulation of an anti-PVRIG antibody or antigen binding fragment thereof comprising a sugar and/or sugar alcohol. In some embodiments, the sugar is trehalose or sucrose. In some embodiments, the sugar is trehalose. In some embodiments, the sugar is sucrose. In some embodiments, the sugar is only one of trehalose or sucrose but not both.

[0891] In some embodiments, the sugar is in an amount of from about 0.5% to 10%, 1% to 9.5%, 1.5% to 9%, 2.0% to 8.5%, 2.5% to 8%, 3.0% to 7.5%, 3.5% to 7%, 4.0% to 6.5%, 4.5% to 6%, and/or 4.5% to 5.5%. In some embodiments, the sugar is in an amount of from about 0.5% to 10%. In some embodiments, the sugar is in an amount of from about 1% to 9.5%. In some embodiments, the sugar is in an amount of from about 1.5% to 9%. In some embodiments, the sugar is in an amount of from about 2.0% to 8.5%. In some embodiments, the sugar is in an amount of from about 2.5% to 8%. In some embodiments, the sugar is in an amount of from about 3.0% to 7.5%. In some embodiments, the sugar is in an amount of from about 3.5% to 7%. In some embodiments, the sugar is in an amount of from about 4.0% to 6.5%. In some embodiments, the sugar is in an amount of from about 4.5% to 6%. In some embodiments, the sugar is in an amount of from about 4.5% to 5.5%. In some embodiments, the sugar is in an amount of about 5%

[0892] D. Non-Ionic Surfactants

[0893] In some embodiments, the present invention provides a stable liquid pharmaceutical formulation of an anti-PVRIG antibody or antigen binding fragment thereof (e.g., anti-PVRIG antibodies including those with CDRs identical to those shown in FIG. 3) comprising a non-ionic surfactant. In some embodiments, the storage stable compositions of an anti-PVRIG antibody or antigen binding fragment comprise a non-ionic surfactant selected from a non-ionic water soluble monoglyceride, a non-ionic water soluble diglyceride, a non-ionic water soluble triglyceride, a non-ionic water soluble monofatty acid esters of polyethyelene glycol, a non-ionic water soluble difatty acid esters of polyethyelene glycol, a non-ionic water soluble sorbitan fatty acid ester, a non-ionic polyglycolyzed glyceride, a non-ionic water soluble triblock copolymer, and a combination thereof. In some embodiments, the non-ionic surfactant is polysorbate 80 (polyoxyethylene (20) sorbitan monooleate).

[0894] In some embodiments, the stable liquid pharmaceutical formulation comprises from 0.006% to 0.1% w/v polysorbate 80, from 0.007% to 0.09% w/v polysorbate 80, from 0.008% to 0.08% w/v polysorbate 80, from 0.009% to 0.09% w/v polysorbate 80, from 0.01% to 0.08% w/v polysorbate 80, from 0.01% to 0.07% w/v polysorbate 80, from 0.01% to 0.07% w/v polysorbate 80, or from 0.01% to 0.06% w/v polysorbate 80, or from 0.009% to 0.05% w/v polysorbate 80. In some embodiments, the stable liquid pharmaceutical formulation comprises from 0.006% to 0.1% w/v polysorbate 80. In some embodiments, the stable liquid pharmaceutical formulation comprises from 0.007% to 0.09% w/v polysorbate 80. In some embodiments, the stable liquid pharmaceutical formulation comprises from 0.008% to 0.08% w/v polysorbate 80. In some embodiments, the stable liquid pharmaceutical formulation comprises from 0.009% to 0.09% w/v polysorbate 80. In some embodiments, the stable liquid pharmaceutical formulation comprises from 0.01% to 0.08% w/v polysorbate 80. In some embodiments, the stable liquid pharmaceutical formulation comprises from 0.01% to 0.07% w/v polysorbate 80. In some embodiments, the stable liquid pharmaceutical formulation comprises from 0.01% to 0.07% w/v polysorbate 80. In some embodiments, the stable liquid pharmaceutical formulation comprises from 0.01% to 0.06% w/v polysorbate 80. In some embodiments, the stable liquid pharmaceutical formulation comprises from 0.009% to 0.05% w/v polysorbate 80. In some embodiments, the stable liquid pharmaceutical formulation comprises about 0.01% polysorbate 80.

[0895] E. Pharmaceutically Acceptable Salts

[0896] In some embodiments, the present invention provides a stable liquid pharmaceutical formulation of an anti-PVRIG antibody or antigen binding fragment thereof (e.g., anti-PVRIG antibodies including those with CDRs identical to those shown in FIG. 3) comprising a salt, for example, a pharmaceutically acceptable salt.

[0897] In some embodiments, the stable liquid pharmaceutical formulation comprising an anti-PVRIG antibody or antigen binding fragment thereof provided herein include a pharmaceutically acceptable salt at a concentration tolerated by the an anti-PVRIG antibody or antigen binding fragment thereof during storage. In some embodiments, the pharmaceutically acceptable salt is a chloride salt. In some embodiments, the pharmaceutically acceptable salt is a monovalent chloride salt. In a more specific embodiment, the pharmaceutically acceptable salt is sodium chloride, potassium chloride, or a combination thereof.

[0898] In some embodiments, the stable liquid pharmaceutical formulation comprises from 30 mM to 100 mM NaCl, from 30 mM to 90 mM NaCl, from 40 mM to 80 mM NaCl, from 30 mM to 70 mM histidine, or from 45 mM to 70 mM NaCl.

[0899] In some embodiments, the stable liquid pharmaceutical formulation comprises from 30 mM to 100 mM NaCl. In some embodiments, the stable liquid pharmaceutical formulation comprises from 30 mM to 90 mM NaCl. In some embodiments, the stable liquid pharmaceutical formulation comprises from 40 mM to 80 mM NaCl. In some embodiments, the stable liquid pharmaceutical formulation comprises from 30 mM to 70 mM histidine. In some embodiments, the stable liquid pharmaceutical formulation comprises or from 45 mM to 70 mM NaCl. In some embodiments, pharmaceutical formulation comprises about 60 mM NaCl.

[0900] F. Buffering Agents

[0901] In some embodiments, the present invention provides a stable liquid pharmaceutical formulation of an anti-PVRIG antibody or antigen binding fragment thereof (e.g., anti-PVRIG antibodies including those with CDRs identical to those shown in FIG. 3) that is buffered at a physiologically acceptable pH. In some embodiments, the physiologically acceptable pH is from about 6.0 to about 7.0.

[0902] In some embodiments, stable liquid pharmaceutical formulation of an anti-PVRIG antibody or antigen binding fragment thereof has a pH of from 6 to 7.0. In some embodiments, stable liquid pharmaceutical formulation of an anti-PVRIG antibody or antigen binding fragment thereof has a pH of 6, 6.1, 6.2, 6.3, 6.4, 6.5, 6.6, 6.7, 6.8, 6.9, or 7.0. In some embodiments, the pH is from 6.1 to 6.9. In some embodiments, the pH is from 6.2 to 6.9. In some embodiments, the pH is from 6.3 to 6.8. In some embodiments, the pH is from 6.3 to 6.7. In some embodiments, the pH is from 6.4 to 6.8. In some embodiments, the pH is from 6.5 to 6.8. In some embodiments, the pH is from 6.6 to 6.8. In some embodiments, the pH is 6.3, 6.4, 6.5, 6.6, or 6.7. In some embodiments, the pH is 6.5+/−0.2.

[0903] G. Methods for Diluting Aqueous Compositions

[0904] [In some embodiments, the method includes adding a dilution buffer, to form a diluted stable liquid pharmaceutical formulation comprising an anti-PVRIG antibody or antigen binding fragment thereof (e.g., anti-PVRIG antibodies including those with CDRs identical to those shown in FIG. 3). In some embodiments, the dilution buffer is added at a ratio of from 1:1 (dilution buffer:formulation) to 1000:1 (dilution buffer:formulation). In another embodiment, the dilution buffer is added at a ratio of from 1:1 dilution buffer:formulation) to 500:1 (dilution buffer:formulation). In another embodiment, the dilution buffer is added at a ratio of from 1:1 (dilution buffer:formulation) to 250:1 (dilution buffer:formulation). In another embodiment, the dilution buffer is added at a ratio of from 1:1 (dilution buffer:formulation) to 200:1 (dilution buffer:formulation). In another embodiment, the dilution buffer is added at a ratio of from 1:1 (dilution buffer:formulation) to 100:1 (dilution buffer:formulation). In another embodiment, the dilution buffer is added at a ratio of from 1:1 (dilution buffer:formulation) to 50:1 (dilution buffer:formulation).

[0905] In some embodiments, the stable liquid pharmaceutical formulation comprising an anti-PVRIG antibody or antigen binding fragment thereof is diluted from 1-fold to 1000-fold, from 1-fold to 500-fold, from 1-fold to 250-fold, from 1-fold to 200-fold, from 1-fold to 100-fold, from 1-fold to 50-fold, from 1-fold to 10-fold, from 10-fold to 1000-fold, from 10-fold to 500-fold, from 10-fold to 250-fold, from 10-fold to 200-fold, from 10-fold to 100-fold, from 10-fold to 50-fold, from 50-fold to 1000-fold, from 50-fold to 500-fold, from 50-fold to 250-fold, from 50-fold to 200-fold, from 50-fold to 100-fold, from 100-fold to 1000-fold, from 100-fold to 500-fold, from 100-fold to 250-fold, from 100-fold to 200-fold, from 200-fold to 1,000-fold, from 200-fold to 500-fold, or from 200-fold to 250-fold.

[0906] H. Stability Assays

[0907] As discussed herein, the stable liquid pharmaceutical formulations comprising an anti-PVRIG antibody or antigen binding fragment thereof (e.g., anti-PVRIG antibodies including those with CDRs identical to those shown in FIG. 3) show improved stability as compared to control formulations. In one embodiment, improved stability includes retention of a higher percentage of binding activity and/or no reduction in binding activity as compared to control formulations in various stability assays. Such assays can be used to determine if a formulation is a highly stabilized formulation. In some embodiments, the highly stabilized formulation has at least 5%, 10%, 20%, 30%, 40%, 50%, 55%, 60%, 65%, 70%, 75%, 80%, 85%, 90%, 95%, 96%, 97%, 98%, 99% or greater activity than a control formulation when assessed by any of the stability assays discussed herein or known in the art.

[0908] In some embodiments, the liquid pharmaceutical formulations comprising an anti-PVRIG antibody or antigen binding fragment thereof are tested under stressor conditions, such as storage at high temperature, agitation, freeze/thaw cycles, or some combination thereof. After such stressors, the formulations are assayed using any of the methods described herein or known in the art to determine the stability under these conditions.

### A280 and Appearance Analysis

[0909] In some embodiments, an A280 by SoloVPE assay can be employed to examine the appearance of the stable liquid pharmaceutical formulations comprising an anti-PVRIG antibody or antigen binding fragment thereof.

[0910] In some embodiments, the SoloVPE assay can be employed to examine concentrations for the stable liquid pharmaceutical formulations comprising an anti-PVRIG antibody or antigen binding fragment thereof.

[0911] A280: Amino acids containing aromatic side chains exhibit strong UV-light absorption at the wavelength of 280 nm. Once an absorptivity coefficient has been established for a given protein, the protein's concentration in solution can be calculated from its absorbance. The method is designed to determine the protein concentration by measuring its absorbance at 280 nm using the SoloVPE instrument without dilution (https://www.ctechnologiesinc.com/products/solovpe)

[0912] Appearance: Sample appearance determination is assessed by holding the sample within a controlled light source and observe the appearance of the material. Gently agitate the solution and determine if the appearance changes when viewed against a black and white background. Use adjectives such as “clear”, “turbid”, or “slightly turbid” to assess clarity. Be specific with regards to the color of the material. If the material is colorless then state that as a result (i.e., clear, colorless solution). specify the physical state of the sample (i.e., liquid or frozen liquid)

### Binding Assay Analysis

[0913] In some embodiments, a binding assay can be performed to examine the activity of the stable liquid pharmaceutical formulations comprising an anti-PVRIG antibody or antigen binding fragment thereof.

### LabChip Analysis

[0914] In some embodiments, a LabChip analysis is employed to examine purity, including for example, IgG purity as well as HC+LC percentages for the stable liquid pharmaceutical formulations comprising an anti-PVRIG antibody or antigen binding fragment thereof. In some embodiments, the stable liquid pharmaceutical formulations comprising an anti-PVRIG antibody or antigen binding fragment thereof exhibit IgG purity percentages greater than 94%, greater than 95%, greater than 96%, greater than 97%, or greater than 98%. In some embodiments, the stable liquid pharmaceutical formulations comprising an anti-PVRIG antibody or antigen binding fragment thereof exhibit IgG purity percentages were from about 95% to 98%. In some embodiments, the stable liquid pharmaceutical formulations comprising an anti-PVRIG antibody or antigen binding fragment thereof exhibit IgG purity percentages from about 96% to 97%. In some embodiments, the stable liquid pharmaceutical formulations comprising an anti-PVRIG antibody or antigen binding fragment thereof exhibit HC+LC percentages from about 96% to 100%. In some embodiments, the stable liquid pharmaceutical formulations comprising an anti-PVRIG antibody or antigen binding fragment thereof exhibit HC+LC percentages from about 97% to 100%. In some embodiments, the stable liquid pharmaceutical formulations comprising an anti-PVRIG antibody or antigen binding fragment thereof exhibit HC+LC percentages from about 98% to 100%.

cIEF Analysis

[0915] In some embodiments, a capillary isoelectric focusing (cIEF) can be employed to analyze the stable liquid pharmaceutical formulations comprising an anti-PVRIG antibody or antigen binding fragment thereof for the presence of additional species, including for example, minor acidic species.

### MFI Analysis

[0916] Antibodies can form sub-visible particles in response to stressed conditions, such as heat, freeze/thaw cycles, and agitation. In some embodiments, a microflow imaging (MFI) analysis can be employed to analyze the stable liquid pharmaceutical formulations comprising an anti-PVRIG antibody or antigen binding fragment thereof for the formation of particles in response to stressed conditions. In some embodiments, the stable liquid pharmaceutical formulations of the anti-PVRIG antibody or antigen binding fragment thereof provide for a formulation capable of stabilizing the anti-PVRIG antibody or antigen binding fragment thereof against these stressed conditions and protecting against the formation of particles. MFI can be used to evaluate particle counts at different size ranges (<2 μm, <5 μm, <10 μm, and <25 μm) in different formulations under stressed conditions. Typically, MFI data can be evaluated to choose an appropriate formulation based on generation of the lowest amount of particles/mL for all sizes of particles across all time points, conditions, and formulations.

### SEC Analysis

[0917] In some embodiments, size exclusion chromatography (SEC) can be employed to analyze the stable liquid pharmaceutical formulations comprising an anti-PVRIG antibody or antigen binding fragment thereof. The SEC data showed HMW throughout all time points and conditions; however, it remained stable at about 1%. LMW was present in accelerated conditions and 2-8° C. 8 week time point. Within the 40° C. condition, the LMW did increase from about 1% to 3% from Week 1 to Week 2.

[0918] I. Selected Formulation Embodiments

[0919] In some embodiments, the present invention provides a stable liquid pharmaceutical formulation of an anti-PVRIG antibody comprising:
[0920] (a) an anti-PVRIG antibody comprising:
   [0921] i) a heavy chain variable domain comprising the vhCDR1, vhCDR2, and vhCDR3 from the heavy chain of CHA.7.518.1.H4(S241P) (SEQ ID NO:4), and
   [0922] ii) a light chain variable domain comprising the vlCDR1, vlCDR2, and vlCDR3 from the light chain of CHA.7.518.1.H4(S241P) (SEQ ID NO:9);
[0923] (b) from 10 mM to 100 mM histidine;
[0924] (c) from 30 mM to 100 mM NaCl;
[0925] (d) from 20 mM to 150 mM L-Arginine; and
[0926] (e) from 0.005% to 0.1% w/v polysorbate 80,
[0927] wherein the composition has a pH from 5.5 to 7.0.

[0928] In some embodiments, the present invention provides a stable liquid pharmaceutical formulation of an anti-PVRIG antibody comprising:
[0929] (a) an anti-PVRIG antibody comprising:
   [0930] i) a heavy chain variable domain comprising the vhCDR1, vhCDR2, and vhCDR3 from the heavy chain of CHA.7.518.1.H4(S241P) (SEQ ID NO:4), and
   [0931] ii) a light chain variable domain comprising the vlCDR1, vlCDR2, and vlCDR3 from the light chain of CHA.7.518.1.H4(S241P) (SEQ ID NO:9).
[0932] (a) an anti-PVRIG antibody;
[0933] (b) about 25 mM histidine;
[0934] (c) about 60 mM NaCl;
[0935] (d) about 100 mM L-Arginine; and
[0936] (e) about 0.01% % w/v polysorbate 80,
[0937] wherein the composition has a pH from 6.5+/−0.2.

[0938] In some embodiments, the present invention provides a stable liquid pharmaceutical formulation comprising:
[0939] (a) an anti-PVRIG antibody comprising:
   [0940] i) heavy chain variable domain is from the heavy chain of CHA.7.518.1.H4(S241P) (SEQ ID NO:4), and
   [0941] ii) a light chain variable domain is from the light chain of CHA.7.518.1.H4(S241P) (SEQ ID NO:9);
[0942] (b) from 10 mM to 100 mM histidine;
[0943] (c) from 30 mM to 100 mM NaCl;
[0944] (d) from 20 mM to 150 mM L-Arginine; and
[0945] (e) from 0.005% to 0.1% w/v polysorbate 80,
[0946] wherein the composition has a pH from 5.5 to 7.0.

[0947] In some embodiments, the present invention provides a stable liquid pharmaceutical formulation comprising:
[0948] (a) an anti-PVRIG antibody comprising:
   [0949] i) heavy chain variable domain is from the heavy chain of CHA.7.518.1.H4(S241P) (SEQ ID NO:4), and
   [0950] ii) a light chain variable domain is from the light chain of CHA.7.518.1.H4(S241P) (SEQ ID NO:9);
[0951] (b) about 25 mM histidine;
[0952] (c) about 60 mM NaCl;
[0953] (d) about 100 mM L-Arginine; and
[0954] (e) about 0.01% % w/v polysorbate 80,
[0955] wherein the composition has a pH from 6.5+/−0.2.

[0956] In some embodiments, the present invention provides a stable liquid pharmaceutical formulation comprising:
[0957] (a) an anti-PVRIG antibody comprising:
   [0958] i) a heavy chain comprising:
      [0959] a) a VH-CH1-hinge-CH2-CH3, wherein the VH is from CHA.7.518.1.H4(S241P) (SEQ ID NO:4) and wherein the CH1-hinge-CH2-CH3 region is from IgG4; and
   [0960] ii) a light chain comprising:
      [0961] a) a VL-CL, wherein the VL from CHA.7.518.1.H4(S241P) (SEQ ID NO:9) and wherein the CL region is from human kappa 2 light chain;
[0962] (b) from 10 mM to 100 mM histidine;
[0963] (c) from 30 mM to 100 mM NaCl;
[0964] (d) from 20 mM to 150 mM L-Arginine; and
[0965] (e) from 0.005% to 0.1% w/v polysorbate 80,
[0966] wherein the composition has a pH from 5.5 to 7.0.

[0967] In some embodiments, the present invention provides a stable liquid pharmaceutical formulation comprising:
[0968] (a) an anti-PVRIG antibody comprising:
   [0969] i) a heavy chain comprising:
      [0970] a) a VH-CH1-hinge-CH2-CH3, wherein the VH is from CHA.7.518.1.H4(S241P) (SEQ ID NO:4) and wherein the CH1-hinge-CH2-CH3 region is from IgG4; and
   [0971] ii) a light chain comprising:
      [0972] a) a VL-CL, wherein the VL from CHA.7.518.1.H4(S241P) (SEQ ID NO:9) and wherein the CL region is from human kappa 2 light chain;
[0973] (b) about 25 mM histidine;
[0974] (c) about 60 mM NaCl;
[0975] (d) about 100 mM L-Arginine; and
[0976] (e) about 0.01% % w/v polysorbate 80,
[0977] wherein the composition has a pH from 6.5+/−0.2.

[0978] In some embodiments, the present invention provides a stable liquid pharmaceutical formulation comprising:
[0979] (a) an anti-PVRIG antibody comprising:
   [0980] i) a heavy chain comprising the heavy chain from CHA.7.518.1.H4(S241P) (SEQ ID NO:8); and
   [0981] ii) a light chain comprising the light chain from CHA.7.518.1.H4(S241P) (SEQ ID NO:13);
[0982] (b) from 10 mM to 100 mM histidine;
[0983] (c) from 30 mM to 100 mM NaCl;
[0984] (d) from 20 mM to 150 mM L-Arginine; and
[0985] (e) from 0.005% to 0.1% w/v polysorbate 80,
[0986] wherein the composition has a pH from 5.5 to 7.0.

[0987] In some embodiments, the present invention provides a stable liquid pharmaceutical formulation comprising:
[0988] (a) an anti-PVRIG antibody comprising:
   [0989] i) a heavy chain comprising the heavy chain from CHA.7.518.1.H4(S241P) (SEQ ID NO:8); and
   [0990] ii) a light chain comprising the light chain from CHA.7.518.1.H4(S241P) (SEQ ID NO:13);
[0991] (b) about 25 mM histidine;
[0992] (c) about 60 mM NaCl;
[0993] (d) about 100 mM L-Arginine; and
[0994] (e) about 0.01% % w/v polysorbate 80,
[0995] wherein the composition has a pH from 6.5+/−0.2.

### VIII. Administration of Formulations of Anti-PVRIG Antibodies

[0996] Administration of the pharmaceutical composition comprising anti-PVRIG antibodies of the present invention (e.g., anti-PVRIG antibodies including those with CDRs identical to those shown in FIG. 3), preferably in the form of a sterile aqueous solution, may be done in a variety of ways, As is known in the art, protein therapeutics are often delivered by IV infusion. The antibodies of the present invention may also be delivered using such methods. For example, administration may venious be by intravenous infusion with 0.9% sodium chloride as an infusion vehicle. Such techniques are disclosed in Remington's Pharmaceutical Sciences 16th edition, Osol, A. Ed., 1980.

[0997] The dosing amounts and frequencies of administration are, in some embodiments, selected to be therapeutically or prophylactically effective. As is known in the art, adjustments for protein degradation, systemic versus localized delivery, and rate of new protease synthesis, as well as the age, body weight, general health, sex, diet, time of administration, drug interaction and the severity of the condition may be necessary, and will be ascertainable with routine experimentation by those skilled in the art. In order to treat a patient, a therapeutically effective dose of the Fc variant of the present invention may be administered. By “therapeutically effective dose” herein is meant a dose that produces the effects for which it is administered.

### IX. Dosing

[0998] In some embodiments, the anti-PVRIG antibody and/or antigen binding portion thereof formulations of the present invention can be formulated for administration, including as a unit dosage formulation. In some embodiments, the anti-PVRIG antibody and/or antigen binding portion thereof formulations are administered at a dosage of 0.01 mg/kg of the anti-PVRIG antibody and/or antigen binding portion thereof. In some embodiments, the anti-PVRIG antibody and/or antigen binding portion thereof formulations are administered at a dosage of 0.02 mg/kg of the anti-PVRIG antibody and/or antigen binding portion thereof. In some embodiments, the anti-PVRIG antibody and/or antigen binding portion thereof formulations are administered at a dosage of 0.03 mg/kg of the anti-PVRIG antibody and/or antigen binding portion thereof. In some embodiments, the anti-PVRIG antibody and/or antigen binding portion thereof formulations are administered at a dosage of 0.04 mg/kg of the anti-PVRIG antibody and/or antigen binding portion thereof. In some embodiments, the anti-PVRIG antibody and/or antigen binding portion thereof formulations are administered at a dosage of 0.05 mg/kg of the anti-PVRIG antibody and/or antigen binding portion thereof. In some embodiments, the anti-PVRIG antibody and/or antigen binding portion thereof formulations are administered at a dosage of 0.06 mg/kg of the anti-PVRIG antibody and/or antigen binding portion thereof. In some embodiments, the anti-PVRIG antibody and/or antigen binding portion thereof formulations are administered at a dosage of 0.07 mg/kg of the anti-PVRIG antibody and/or antigen binding portion thereof. In some embodiments, the anti-PVRIG antibody and/or antigen binding portion thereof formulations are administered at a dosage of 0.08 mg/kg of the anti-PVRIG antibody and/or antigen binding portion thereof. In some embodiments, the anti-PVRIG antibody and/or antigen binding portion thereof formulations are administered at a dosage of 0.09 mg/kg of the anti-PVRIG antibody and/or antigen binding portion thereof. In some embodiments, the anti-PVRIG antibody and/or antigen binding portion thereof formulations are administered at a dosage of 0.1 mg/kg of the anti-PVRIG antibody and/or antigen binding portion thereof. In some embodiments, the anti-PVRIG antibody and/or antigen binding portion thereof formulations are administered at a dosage of 0.2 mg/kg of the anti-PVRIG antibody and/or antigen binding portion thereof. In some embodiments, the anti-PVRIG antibody and/or antigen binding portion thereof formulations are administered at a dosage of 0.3 mg/kg of the anti-PVRIG antibody and/or antigen binding portion thereof. In some embodiments, the anti-PVRIG antibody and/or antigen binding portion thereof formulations are administered at a dosage of 0.5 mg/kg of the anti-PVRIG antibody and/or antigen binding portion thereof. In some embodiments, the anti-PVRIG antibody and/or antigen binding portion thereof formulations are administered at a dosage of 0.8 mg/kg of the anti-PVRIG antibody and/or antigen binding portion thereof. In some embodiments, the anti-PVRIG antibody and/or antigen binding portion thereof formulations are administered at a dosage of 1 mg/kg of the anti-PVRIG antibody and/or antigen binding portion thereof. In some embodiments, the anti-PVRIG antibody and/or antigen binding portion thereof formulations are administered at a dosage of 2 mg/kg of the anti-PVRIG antibody and/or antigen binding portion thereof. In some embodiments, the anti-PVRIG antibody and/or antigen binding portion thereof formulations are administered at a dosage of 3 mg/kg of the anti-PVRIG antibody and/or antigen binding portion thereof. In some embodiments, the anti-PVRIG antibody and/or antigen binding portion thereof formulations are administered at a dosage of 4 mg/kg of the anti-PVRIG antibody and/or antigen binding portion thereof. In some embodiments, the anti-PVRIG antibody and/or antigen binding portion thereof formulations are administered at a dosage of 5 mg/kg of the anti-PVRIG antibody and/or antigen binding portion thereof. In some embodiments, the anti-PVRIG antibody and/or antigen binding portion thereof formulations are administered at a dosage of 6 mg/kg of the anti-PVRIG antibody and/or antigen binding portion thereof. In some embodiments, the anti-PVRIG antibody and/or antigen binding portion thereof formulations are administered at a dosage of 7 mg/kg of the anti-PVRIG antibody and/or antigen binding portion thereof. In some embodiments, the anti-PVRIG antibody and/or antigen binding portion thereof formulations are administered at a dosage of 8 mg/kg of the anti-PVRIG antibody and/or antigen binding portion thereof. In some embodiments, the anti-PVRIG antibody and/or antigen binding portion thereof formulations are administered at a dosage of 9 mg/kg of the anti-PVRIG antibody and/or antigen binding portion thereof. In some embodiments, the anti-PVRIG antibody and/or antigen binding portion thereof formulations are administered at a dosage of 10 mg/kg of the anti-PVRIG antibody and/or antigen binding portion thereof. In some embodiments, the anti-PVRIG antibody and/or antigen binding portion thereof formulations are administered at a dosage of 20 mg/kg of the anti-PVRIG antibody and/or antigen binding portion thereof.

[0999] In some embodiments, the anti-PVRIG antibody and/or antigen binding portion thereof formulations is administered at a dosage of about 0.01 mg/kg to about 20 mg/kg of the anti-PVRIG antibody. In some embodiments, the anti-PVRIG antibody and/or antigen binding portion thereof formulations is administered at a dosage of about 0.01 mg/kg to about 10 mg/kg of the anti-PVRIG antibody. In some embodiments, the anti-PVRIG antibody and/or antigen binding portion thereof formulations is administered at a dosage of about 20 mg/kg. In some embodiments, the anti-PVRIG antibody and/or antigen binding portion thereof formulations is administered at a dosage of about 20 mg/kg each 4 weeks. In some embodiments, the anti-PVRIG antibody and/or antigen binding portion thereof formulations is administered at a dosage of about 20 mg/kg IV each 4 weeks. In some embodiments, formulation is administered at a dosage of about 0.1 mg/kg to about 10 mg/kg of the anti-PVRIG antibody. In some embodiments, formulation is administered at a dosage of about 1 mg/kg to about 10 mg/kg of the anti-PVRIG antibody. In some embodiments, formulation is administered at a dosage of about 2 mg/kg to about 10 mg/kg of the anti-PVRIG antibody. In some embodiments, formulation is administered at a dosage of about 3 mg/kg to about 10 mg/kg of the anti-PVRIG antibody. In some embodiments, formulation is administered at a dosage of about 4 mg/kg to about 10 mg/kg of the anti-PVRIG antibody. In some embodiments, formulation is administered at a dosage of about 5 mg/kg to about 10 mg/kg of the anti-PVRIG antibody. In some embodiments, formulation is administered at a dosage of about 5 mg/kg to about 10 mg/kg of the anti-PVRIG antibody. In some embodiments, formulation is administered at a dosage of about 7 mg/kg to about 10 mg/kg of the anti-PVRIG antibody. In some embodiments, formulation is administered at a dosage of about 8 mg/kg to about 10 mg/kg of the anti-PVRIG antibody. In some embodiments, formulation is administered at a dosage of about 9 mg/kg to about 10 mg/kg of the anti-PVRIG antibody. In some embodiments, formulation is administered at a dosage of about 20 mg/kg of the anti-PVRIG antibody. In some embodiments, formulation is administered at a dosage of about 0.01 mg/kg, 0.03 mg/kg, 0.1 mg/kg, 0.3 mg/kg, 1 mg/kg, 3 mg/kg, 10 mg/kg or 20 mg/kg of the anti-PVRIG antibody.

[1000] A. Selected Dosing with Formulation Embodiments

[1001] In some embodiments, the present invention provides for administration of a stable liquid pharmaceutical formulation of an anti-PVRIG antibody, wherein the anti-PVRIG antibody is administered at a dosage of about 0.01 mg/kg, 0.03 mg/kg, 0.1 mg/kg, 0.3 mg/kg, 1 mg/kg, 3 mg/kg, 10 mg/kg, or 20 mg/kg and wherein the stable liquid formulation of the anti-PVRIG antibody comprises:
[1002] (a) an anti-PVRIG antibody comprising:
   [1003] i) a heavy chain variable domain comprising the vhCDR1, vhCDR2, and vhCDR3 from the heavy chain of CHA.7.518.1.H4(S241P) (SEQ ID NO:4), and
   [1004] ii) a light chain variable domain comprising the vlCDR1, vlCDR2, and vlCDR3 from the light chain of CHA.7.518.1.H4(S241P) (SEQ ID NO:9);
[1005] (b) from 10 mM to 100 mM histidine;
[1006] (c) from 30 mM to 100 mM NaCl;
[1007] (d) from 20 mM to 150 mM L-Arginine; and
[1008] (e) from 0.005% to 0.1% w/v polysorbate 80,
[1009] wherein the composition has a pH from 5.5 to 7.0.

[1010] In some embodiments, the present invention provides for administration of a stable liquid pharmaceutical formulation of an anti-PVRIG antibody, wherein the anti-PVRIG antibody is administered at a dosage of about 0.01 mg/kg, 0.03 mg/kg, 0.1 mg/kg, 0.3 mg/kg, 1 mg/kg, 3 mg/kg, 10 mg/kg, or 20 mg/kg, and wherein the stable liquid formulation of the anti-PVRIG antibody comprises:
[1011] (a) an anti-PVRIG antibody comprising:
   [1012] i) a heavy chain variable domain comprising the vhCDR1, vhCDR2, and vhCDR3 from the heavy chain of CHA.7.518.1.H4(S241P) (SEQ ID NO:4), and
   [1013] ii) a light chain variable domain comprising the vlCDR1, vlCDR2, and vlCDR3 from the light chain of CHA.7.518.1.H4(S241P) (SEQ ID NO:9).
[1014] (a) an anti-PVRIG antibody;
[1015] (b) about 25 mM histidine;
[1016] (c) about 60 mM NaCl;
[1017] (d) about 100 mM L-Arginine; and
[1018] (e) about 0.01% % w/v polysorbate 80,
[1019] wherein the composition has a pH from 6.5+/−0.2.

[1020] In some embodiments, the present invention provides for administration of a stable liquid pharmaceutical formulation of an anti-PVRIG antibody, wherein the anti-PVRIG antibody is administered at a dosage of about 0.01 mg/kg, 0.03 mg/kg, 0.1 mg/kg, 0.3 mg/kg, 1 mg/kg, 3 mg/kg, 10 mg/kg, or 20 mg/kg, and wherein the stable liquid formulation of the anti-PVRIG antibody comprises:
[1021] (a) an anti-PVRIG antibody comprising:
   [1022] i) heavy chain variable domain is from the heavy chain of CHA.7.518.1.H4(S241P) (SEQ ID NO:4), and
   [1023] ii) a light chain variable domain is from the light chain of CHA.7.518.1.H4(S241P) (SEQ ID NO:9);
[1024] (b) from 10 mM to 100 mM histidine;
[1025] (c) from 30 mM to 100 mM NaCl;
[1026] (d) from 20 mM to 150 mM L-Arginine; and
[1027] (e) from 0.005% to 0.1% w/v polysorbate 80,
[1028] wherein the composition has a pH from 5.5 to 7.0.

[1029] In some embodiments, the present invention provides for administration of a stable liquid pharmaceutical formulation of an anti-PVRIG antibody, wherein the anti-PVRIG antibody is administered at a dosage of about 0.01 mg/kg, 0.03 mg/kg, 0.1 mg/kg, 0.3 mg/kg, 1 mg/kg, 3 mg/kg, 10 mg/kg, or 20 mg/kg, and wherein the stable liquid formulation of the anti-PVRIG antibody comprises:
[1030] (a) an anti-PVRIG antibody comprising:
   [1031] i) heavy chain variable domain is from the heavy chain of CHA.7.518.1.H4(S241P) (SEQ ID NO:4), and
   [1032] ii) a light chain variable domain is from the light chain of CHA.7.518.1.H4(S241P) (SEQ ID NO:9);
[1033] (b) about 25 mM histidine;
[1034] (c) about 60 mM NaCl;
[1035] (d) about 100 mM L-Arginine; and
[1036] (e) about 0.01% % w/v polysorbate 80,
[1037] wherein the composition has a pH from 6.5+/−0.2.

[1038] In some embodiments, the present invention provides for administration of a stable liquid pharmaceutical formulation of an anti-PVRIG antibody, wherein the anti-PVRIG antibody is administered at a dosage of about 0.01 mg/kg, 0.03 mg/kg, 0.1 mg/kg, 0.3 mg/kg, 1 mg/kg, 3 mg/kg, 10 mg/kg, or 20 mg/kg, and wherein the stable liquid formulation of the anti-PVRIG antibody comprises:
[1039] (a) an anti-PVRIG antibody comprising:
   [1040] i) a heavy chain comprising:
      [1041] a) a VH-CH1-hinge-CH2-CH3, wherein the VH is from CHA.7.518.1.H4(S241P) (SEQ ID NO:4) and wherein the CH1-hinge-CH2-CH3 region is from IgG4; and
   [1042] ii) a light chain comprising:
      [1043] a) a VL-CL, wherein the VL from CHA.7.518.1.H4(S241P) (SEQ ID NO:9) and wherein the CL region is from human kappa 2 light chain;
[1044] (b) from 10 mM to 100 mM histidine;
[1045] (c) from 30 mM to 100 mM NaCl;
[1046] (d) from 20 mM to 150 mM L-Arginine; and
[1047] (e) from 0.005% to 0.1% w/v polysorbate 80,
[1048] wherein the composition has a pH from 5.5 to 7.0.

[1049] In some embodiments, the present invention provides for administration of a stable liquid pharmaceutical formulation of an anti-PVRIG antibody, wherein the anti-PVRIG antibody is administered at a dosage of about 0.01 mg/kg, 0.03 mg/kg, 0.1 mg/kg, 0.3 mg/kg, 1 mg/kg, 3 mg/kg, 10 mg/kg, or 20 mg/kg, and wherein the stable liquid formulation of the anti-PVRIG antibody comprises:
[1050] (a) an anti-PVRIG antibody comprising:
   [1051] i) a heavy chain comprising:
      [1052] a) a VH-CH1-hinge-CH2-CH3, wherein the VH is from CHA.7.518.1.H4(S241P) (SEQ ID NO:4) and wherein the CH1-hinge-CH2-CH3 region is from IgG4; and
   [1053] ii) a light chain comprising:
      [1054] a) a VL-CL, wherein the VL from CHA.7.518.1.H4(S241P) (SEQ ID NO:9) and wherein the CL region is from human kappa 2 light chain;
[1055] (b) about 25 mM histidine;
[1056] (c) about 60 mM NaCl;
[1057] (d) about 100 mM L-Arginine; and
[1058] (e) about 0.01% % w/v polysorbate 80,
[1059] wherein the composition has a pH from 6.5+/−0.2.

[1060] In some embodiments, the present invention provides for administration of a stable liquid pharmaceutical formulation of an anti-PVRIG antibody, wherein the anti-PVRIG antibody is administered at a dosage of about 0.01 mg/kg, 0.03 mg/kg, 0.1 mg/kg, 0.3 mg/kg, 1 mg/kg, 3 mg/kg, 10 mg/kg, or 20 mg/kg, and wherein the stable liquid formulation of the anti-PVRIG antibody comprises:
[1061] (a) an anti-PVRIG antibody comprising:
   [1062] i) a heavy chain comprising the heavy chain from CHA.7.518.1.H4(S241P) (SEQ ID NO:8); and
   [1063] ii) a light chain comprising the light chain from CHA.7.518.1.H4(S241P) (SEQ ID NO:13);
[1064] (b) from 10 mM to 100 mM histidine;
[1065] (c) from 30 mM to 100 mM NaCl;
[1066] (d) from 20 mM to 150 mM L-Arginine; and
[1067] (e) from 0.005% to 0.1% w/v polysorbate 80,
[1068] wherein the composition has a pH from 5.5 to 7.0.

[1069] In some embodiments, the present invention provides for administration of a stable liquid pharmaceutical formulation of an anti-PVRIG antibody, wherein the anti-PVRIG antibody is administered at a dosage of about 0.01 mg/kg, 0.03 mg/kg, 0.1 mg/kg, 0.3 mg/kg, 1 mg/kg, 3 mg/kg, 10 mg/kg, or 20 mg/kg, and wherein the stable liquid formulation of the anti-PVRIG antibody comprises:
[1070] (a) an anti-PVRIG antibody comprising:
   [1071] i) a heavy chain comprising the heavy chain from CHA.7.518.1.H4(S241P) (SEQ ID NO:8); and
   [1072] ii) a light chain comprising the light chain from CHA.7.518.1.H4(S241P) (SEQ ID NO:13);
[1073] (b) about 25 mM histidine;
[1074] (c) about 60 mM NaCl;
[1075] (d) about 100 mM L-Arginine; and
[1076] (e) about 0.01% % w/v polysorbate 80,
[1077] wherein the composition has a pH from 6.5+/−0.2.

[1078] In some embodiments of the stable liquid pharmaceutical formulation, the formulation is administered with an anti-PD-1 antibody.

[1079] In some embodiments of the stable liquid pharmaceutical formulation, the anti-PD-1 antibody is an antibody selected from the group consisting of pembrolizumab and nivolumab.

[1080] In some embodiments of the stable liquid pharmaceutical formulation, the anti-PD-1 antibody is nivolumab. In some embodiments of the stable liquid pharmaceutical formulation, the anti-PD-1 antibody is nivolumab is administered at a dosage of about 360 mg or 480 mg. In some embodiments of the stable liquid pharmaceutical formulation, the anti-PD-1 antibody is nivolumab is administered at a dosage of about 360 mg. In some embodiments of the stable liquid pharmaceutical formulation, the anti-PD-1 antibody is nivolumab is administered at a dosage of about 480 mg.

[1081] In some embodiments of the stable liquid pharmaceutical formulation, the anti-PD-1 antibody is pembrolizumab.

### X. Methods of Using the Anti-PVRIG Antibody Formulations

[1082] A. Therapeutic Uses

[1083] The anti-PVRIG antibodies (e.g., anti-PVRIG antibodies including those with CDRs identical to those shown in FIG. 3) find use in treating patients, such as human subjects, generally with a condition associated with PVRIG. The term “treatment” as used herein, refers to both therapeutic treatment and prophylactic or preventative measures, which in this example relates to treatment of cancer; Those in need of treatment include those already with cancer as well as those in which the cancer is to be prevented. Hence, the mammal to be treated herein may have been diagnosed as having the cancer or may be predisposed or susceptible to the cancer. As used herein the term “treating” refers to preventing, delaying the onset of, curing, reversing, attenuating, alleviating, minimizing, suppressing, halting the deleterious effects or stabilizing of discernible symptoms of the above-described cancerous diseases, disorders or conditions. It also includes managing the cancer as described above. By “manage” it is meant reducing the severity of the disease, reducing the frequency of episodes of the disease, reducing the duration of such episodes, reducing the severity of such episodes, slowing/reducing cancer cell growth or proliferation, slowing progression of at least one symptom, amelioration of at least one measurable physical parameter and the like. For example, immunostimulatory anti-PVRIG immune molecules should promote T cell or NK or cytokine immunity against target cells, e.g., cancer, infected or pathogen cells and thereby treat cancer by depleting the cells involved in the disease condition.

[1084] The PVRIG antibodies of the invention are provided in therapeutically effective dosages. A “therapeutically effective dosage” of an anti-PVRIG immune molecule according to at least some embodiments of the present invention preferably results in a decrease in severity of disease symptoms, an increase in frequency and duration of disease symptom-free periods, an increase in lifespan, disease remission, or a prevention or reduction of impairment or disability due to the disease affliction. For example, for the treatment of PVRIG positive tumors, a “therapeutically effective dosage” preferably inhibits cell growth or tumor growth by at least about 20%, more preferably by at least about 40%, even more preferably by at least about 60%, and still more preferably by at least about 80% relative to untreated subjects. The ability of a compound to inhibit tumor growth can be evaluated in an animal model system predictive of efficacy in human tumors. Alternatively, this property of a composition can be evaluated by examining the ability of the compound to inhibit, such inhibition in vitro by assays known to the skilled practitioner. A therapeutically effective amount of a therapeutic compound can decrease tumor size, or otherwise ameliorate symptoms in a subject.

[1085] One of ordinary skill in the art would be able to determine a therapeutically effective amount based on such factors as the subject's size, the severity of the subject's symptoms, and the particular composition or route of administration selected.

[1086] 1. Cancer Treatment

[1087] The PVRIG antibody formulations of the invention find particular use in the treatment of cancer. In general, the antibodies of the invention are immunomodulatory, in that rather than directly attack cancerous cells, the anti-PVRIG antibodies of the invention stimulate the immune system, generally by inhibiting the action of PVRIG. Thus, unlike tumor-targeted therapies, which are aimed at inhibiting molecular pathways that are crucial for tumor growth and development, and/or depleting tumor cells, cancer immunotherapy is aimed to stimulate the patient's own immune system to eliminate cancer cells, providing long-lived tumor destruction. Various approaches can be used in cancer immunotherapy, among them are therapeutic cancer vaccines to induce tumor-specific T cell responses, and immunostimulatory antibodies (i.e. antagonists of inhibitory receptors=immune checkpoints) to remove immunosuppressive pathways.

[1088] Clinical responses with targeted therapy or conventional anti-cancer therapies tend to be transient as cancer cells develop resistance, and tumor recurrence takes place. However, the clinical use of cancer immunotherapy in the past few years has shown that this type of therapy can have durable clinical responses, showing dramatic impact on long term survival. However, although responses are long term, only a small number of patients respond (as opposed to conventional or targeted therapy, where a large number of patients respond, but responses are transient).

[1089] By the time a tumor is detected clinically, it has already evaded the immune-defense system by acquiring immunoresistant and immunosuppressive properties and creating an immunosuppressive tumor microenvironment through various mechanisms and a variety of immune cells.

[1090] Accordingly, the anti-PVRIG antibodies of the invention are useful in treating cancer. Due to the nature of an immuno-oncology mechanism of action, PVRIG does not necessarily need to be overexpressed on or correlated with a particular cancer type; that is, the goal is to have the anti-PVRIG antibodies de-suppress T cell and NK cell activation, such that the immune system will go after the cancers.

[1091] “Cancer,” as used herein, refers broadly to any neoplastic disease (whether invasive or metastatic) characterized by abnormal and uncontrolled cell division causing malignant growth or tumor (e.g., unregulated cell growth). The term “cancer” or “cancerous” as used herein should be understood to encompass any neoplastic disease (whether invasive, non-invasive or metastatic) which is characterized by abnormal and uncontrolled cell division causing malignant growth or tumor, non-limiting examples of which are described herein. This includes any physiological condition in mammals that is typically characterized by unregulated cell growth.

[1092] In some embodiments, the anti-PVRIG formulations of the present invention can be used in the treatment of solid tumors (including, for example, cancers of the lung, liver, breast, brain, GI tract) and blood cancers (including for example, leukemia and preleukemic disorders, lymphoma, plasma cell disorders) carcinoma, lymphoma, blastoma, sarcoma, and leukemia or lymphoid malignancies. In some embodiments, the cancer is early. In some embodiments, the cancer is advanced (including metastatic). In some embodiments, the cancers amenable for treatment of the invention include cancers that express or do not express PVRIG and further include non-metastatic or non-invasive, as well as invasive or metastatic cancers, including cancers where PVRIG expression by immune, stromal, or diseased cells suppresses antitumor responses and anti-invasive immune responses. In some embodiments, the anti-PVRIG formulations can be used for the treatment of vascularized tumors. In some embodiments, the cancer for treatment using the anti-PVRIG formulations of the present invention includes carcinoma, lymphoma, sarcoma, and/or leukemia. In some embodiments, the cancer for treatment using the anti-PVRIG formulations of the present invention includes melanoma, non-melanoma skin cancer (squamous and basal cell carcinoma), mesothelioma, squamous cell cancer, lung cancer (including small-cell lung cancer, non-small cell lung cancer, soft-tissue sarcoma, Kaposi's sarcoma, adenocarcinoma of the lung, squamous carcinoma of the lung, cancer of the peritoneum, esophageal cancer, hepatocellular cancer, liver cancer (including HCC), gastric cancer, stomach cancer (including gastrointestinal cancer), pancreatic cancer, glioblastoma, cervical cancer, ovarian cancer, urothelial cancer, bladder cancer, hepatoma, glioma, brain cancer (as well as edema, such as that associated with brain tumors), breast cancer (including, for example, triple negative breast cancer), testis cancer, testicular germ cell tumors, colon cancer, colorectal cancer (CRC), colorectal cancer MSS (MSS-CRC; including refractory MSS colorectal; MSS=microsatellite stable status), primary peritoneal cancer, microsatellite stable primary peritoneal cancer, platinum resistant microsatellite stable primary peritoneal cancer, CRC (MSS unknown), rectal cancer, endometrial cancer (including endometrial carcinoma), uterine carcinoma, salivary gland carcinoma, kidney cancer, renal cell cancer (RCC), renal cell carcinoma (RCC), prostate cancer, vulval cancer, thyroid cancer, hepatic carcinoma, carcinoid carcinoma, head and neck cancer, B-cell lymphoma (including non-Hodgkin's lymphoma, as well as low grade/follicular non-Hodgkin's lymphoma (NHL), small lymphocytic (SL) NHL, intermediate grade/follicular NHL, intermediate grade diffuse NHL, Diffuse Large B cell lymphoma, high grade immunoblastic NHL, high grade lymphoblastic NHL, high grade small non-cleaved cell NHL, bulky disease NHL, mantle cell lymphoma, AIDS-related lymphoma, and Waldenström's Macroglobulinemia), Hodgkin's lymphoma (HD), chronic lymphocytic leukemia (CLL), acute lymphoblastic leukemia (ALL), T cell Acute Lymphoblastic Leukemia (T-ALL), Acute myeloid leukemia (AML), Hairy cell leukemia, chronic myeloblastic leukemia, multiple myeloma, post-transplant lymphoproliferative disorder (PTLD), abnormal vascular proliferation associated with phakomatoses, Meigs' syndrome, Merkel Cells cancer, MSI-high cancer, KRAS mutant tumors, adult T-cell leukemia/lymphoma, adenoid cystic cancer (including adenoid cystic carcinoma), malignant melanoma, pancreatic cancer, pancreatic adenocarcinoma, ovarian cancer (including ovarian carcinoma), pleural mesothelioma, neuroendocrine lung cancer (including pleural mesothelioma, neuroendocrine lung carcinoma), NSCL (large cell), NSCLC large cell adenocarcinoma, non-small cell lung carcinoma (NSCLC), NSCLC squamous cell, cervical squamous cell carcinoma (cervical SCC), anal squamous cell carcinoma (anal SCC), neuroendocrine lung carcinoma, carcinoma of unknown primary, gallbladder cancer, malignant melanoma, pleural mesothelioma, Myelodysplastic syndromes (MDS), HNSCC, PD1 refractory or relapsing cancer, gastroesophageal junction cancer, gastric cancer, and/or fallopian tube cancer.

[1093] In some embodiments, the cancer for treatment using the anti-PVRIG formulations of the present invention includes a cancer selected from the group consisting of prostate cancer, liver cancer (HCC), colorectal cancer (CRC), colorectal cancer MSS (MSS-CRC; including refractory MSS colorectal), CRC (MSS unknown), ovarian cancer (including ovarian carcinoma), endometrial cancer (including endometrial carcinoma), breast cancer, pancreatic cancer, stomach cancer, cervical cancer, head and neck cancer, thyroid cancer, testis cancer, urothelial cancer, lung cancer, melanoma, non-melanoma skin cancer (squamous and basal cell carcinoma), glioma, renal cell cancer (RCC), renal cell carcinoma (RCC), lymphoma (non-Hodgkins' lymphoma (NHL) and Hodgkin's lymphoma (HD)), Acute myeloid leukemia (AML), T cell Acute Lymphoblastic Leukemia (T-ALL), Diffuse Large B cell lymphoma, testicular germ cell tumors, mesothelioma, esophageal cancer, triple negative breast cancer, Merkel Cells cancer, MSI-high cancer, KRAS mutant tumors, adult T-cell leukemia/lymphoma, pleural mesothelioma, anal SCC, neuroendocrine lung cancer (including neuroendocrine lung carcinoma), NSCLC, NSCL (large cell), NSCLC large cell, NSCLC squamous cell, cervical SCC, malignant melanoma, pancreatic cancer, pancreatic adenocarcinoma, adenoid cystic cancer (including adenoid cystic carcinoma), primary peritoneal cancer, microsatellite stable primary peritoneal cancer, platinum resistant microsatellite stable primary peritoneal cancer, Myelodysplastic syndromes (MDS), HNSCC, PD1 refractory or relapsing cancer, gastroesophageal junction cancer, gastric cancer, and/or fallopian tube cancer.

[1094] “Cancer therapy” herein refers to any method that prevents or treats cancer or ameliorates one or more of the symptoms of cancer. Typically such therapies will comprises administration of immunostimulatory anti-PVRIG antibodies (including antigen-binding fragments) either alone or in combination with chemotherapy or radiotherapy or other biologics and for enhancing the activity thereof, i.e., in individuals wherein expression of PVRIG suppresses antitumor responses and the efficacy of chemotherapy or radiotherapy or biologic efficacy.

[1095] In some embodiments, anti-PVRIG antibodies are used in combination with antagonistic antibodies targeting PD-1 (e.g., anti-PD-1 antibodies), including for example but not limited to nivolumab and/or pembrolizumab. In some embodiments, the anti-PD-1 antibody is an antibody selected from the group consisting of nivolumab and pembrolizumab. In some embodiments, the anti-PD-1 antibody is nivolumab. In some embodiments, the anti-PD-1 antibody is pembrolizumab. In some embodiments, the anti-PD-1 antibody is nivolumab is administered at 360 mg. In some embodiments, the anti-PD-1 antibody is nivolumab is administered at 360 mg IV. In some embodiments, the anti-PD-1 antibody is nivolumab is administered at 360 mg IV 3 weeks (e.g., 360 mg IV Q3 weeks). In some embodiments, the anti-PD-1 antibody is nivolumab is administered at 480 mg. In some embodiments, the anti-PD-1 antibody is nivolumab is administered at 480 mg IV. In some embodiments, the anti-PD-1 antibody is nivolumab is administered at 480 mg IV 3 weeks (e.g., 480 mg IV Q3 weeks). In some embodiments, the subject administered the anti-PVRIG antibody in combination with the anti-PD-1 antibody has exhausted all available standard therapy, including for example, but not limited to ECOG 0-1, prior anti-PD-1, prior anti-PD-L1, prior anti-CTLA-4, prior OX-40, and/or prior CD137 therapies.

[1096] 2. Selected Monotherapy Treatment with Formulation Embodiments

[1097] In some embodiments, the present invention provides for treatment of cancer in a subject in need thereof by administration of a stable liquid pharmaceutical formulation of an anti-PVRIG antibody, wherein the anti-PVRIG antibody is administered at a dosage of about 0.01 mg/kg, 0.03 mg/kg, 0.1 mg/kg, 0.3 mg/kg, 1 mg/kg, 3 mg/kg, 10 mg/kg, or 20 mg/kg, and wherein the stable liquid formulation of the anti-PVRIG antibody comprises:
[1098] (a) an anti-PVRIG antibody comprising:
   [1099] i) a heavy chain variable domain comprising the vhCDR1, vhCDR2, and vhCDR3 from the heavy chain of CHA.7.518.1.H4(S241P) (SEQ ID NO:4), and
   [1100] ii) a light chain variable domain comprising the vlCDR1, vlCDR2, and vlCDR3 from the light chain of CHA.7.518.1.H4(S241P) (SEQ ID NO:9);
[1101] (b) from 10 mM to 100 mM histidine;
[1102] (c) from 30 mM to 100 mM NaCl;
[1103] (d) from 20 mM to 150 mM L-Arginine; and
[1104] (e) from 0.005% to 0.1% w/v polysorbate 80,
[1105] wherein the composition has a pH from 5.5 to 7.0.

[1106] In some embodiments, the present invention provides for treatment of cancer in a subject in need thereof by administration of a stable liquid pharmaceutical formulation of an anti-PVRIG antibody, wherein the anti-PVRIG antibody is administered at a dosage of about 0.01 mg/kg, 0.03 mg/kg, 0.1 mg/kg, 0.3 mg/kg, 1 mg/kg, 3 mg/kg, 10 mg/kg, or 20 mg/kg, and wherein the stable liquid formulation of the anti-PVRIG antibody comprises:
[1107] (a) an anti-PVRIG antibody comprising:
   [1108] i) a heavy chain variable domain comprising the vhCDR1, vhCDR2, and vhCDR3 from the heavy chain of CHA.7.518.1.H4(S241P) (SEQ ID NO:4), and
   [1109] ii) a light chain variable domain comprising the vlCDR1, vlCDR2, and vlCDR3 from the light chain of CHA.7.518.1.H4(S241P) (SEQ ID NO:9).
[1110] (a) an anti-PVRIG antibody;
[1111] (b) about 25 mM histidine;
[1112] (c) about 60 mM NaCl;
[1113] (d) about 100 mM L-Arginine; and
[1114] (e) about 0.01% % w/v polysorbate 80,
[1115] wherein the composition has a pH from 6.5+/−0.2.

[1116] In some embodiments, the present invention provides for treatment of cancer in a subject in need thereof by administration of a stable liquid pharmaceutical formulation of an anti-PVRIG antibody, wherein the anti-PVRIG antibody is administered at a dosage of about 0.01 mg/kg, 0.03 mg/kg, 0.1 mg/kg, 0.3 mg/kg, 1 mg/kg, 3 mg/kg, 10 mg/kg, or 20 mg/kg, and wherein the stable liquid formulation of the anti-PVRIG antibody comprises:
[1117] (a) an anti-PVRIG antibody comprising:
   [1118] i) heavy chain variable domain is from the heavy chain of CHA.7.518.1.H4(S241P) (SEQ ID NO:4), and
   [1119] ii) a light chain variable domain is from the light chain of CHA.7.518.1.H4(S241P) (SEQ ID NO:9);
[1120] (b) from 10 mM to 100 mM histidine;
[1121] (c) from 30 mM to 100 mM NaCl;
[1122] (d) from 20 mM to 150 mM L-Arginine; and
[1123] (e) from 0.005% to 0.1% w/v polysorbate 80,
[1124] wherein the composition has a pH from 5.5 to 7.0.

[1125] In some embodiments, the present invention provides for treatment of cancer in a subject in need thereof by administration of a stable liquid pharmaceutical formulation of an anti-PVRIG antibody, wherein the anti-PVRIG antibody is administered at a dosage of about 0.01 mg/kg, 0.03 mg/kg, 0.1 mg/kg, 0.3 mg/kg, 1 mg/kg, 3 mg/kg, 10 mg/kg, or 20 mg/kg, and wherein the stable liquid formulation of the anti-PVRIG antibody comprises:
[1126] (a) an anti-PVRIG antibody comprising:
   [1127] i) heavy chain variable domain is from the heavy chain of CHA.7.518.1.H4(S241P) (SEQ ID NO:4), and
   [1128] ii) a light chain variable domain is from the light chain of CHA.7.518.1.H4(S241P) (SEQ ID NO:9);
[1129] (b) about 25 mM histidine;
[1130] (c) about 60 mM NaCl;
[1131] (d) about 100 mM L-Arginine; and
[1132] (e) about 0.01% % w/v polysorbate 80,
[1133] wherein the composition has a pH from 6.5+/−0.2.

[1134] In some embodiments, the present invention provides for treatment of cancer in a subject in need thereof by administration of a stable liquid pharmaceutical formulation of an anti-PVRIG antibody, wherein the anti-PVRIG antibody is administered at a dosage of about 0.01 mg/kg, 0.03 mg/kg, 0.1 mg/kg, 0.3 mg/kg, 1 mg/kg, 3 mg/kg, 10 mg/kg, or 20 mg/kg, and wherein the stable liquid formulation of the anti-PVRIG antibody comprises:
[1135] (a) an anti-PVRIG antibody comprising:
   [1136] i) a heavy chain comprising:
      [1137] a) a VH-CH1-hinge-CH2-CH3, wherein the VH is from CHA.7.518.1.H4(S241P) (SEQ ID NO:4) and wherein the CH1-hinge-CH2-CH3 region is from IgG4; and
   [1138] ii) a light chain comprising:
      [1139] a) a VL-CL, wherein the VL from CHA.7.518.1.H4(S241P) (SEQ ID NO:9) and wherein the CL region is from human kappa 2 light chain;
[1140] (b) from 10 mM to 100 mM histidine;
[1141] (c) from 30 mM to 100 mM NaCl;
[1142] (d) from 20 mM to 150 mM L-Arginine; and
[1143] (e) from 0.005% to 0.1% w/v polysorbate 80,
[1144] wherein the composition has a pH from 5.5 to 7.0.

[1145] In some embodiments, the present invention provides for treatment of cancer in a subject in need thereof by administration of a stable liquid pharmaceutical formulation of an anti-PVRIG antibody, wherein the anti-PVRIG antibody is administered at a dosage of about 0.01 mg/kg, 0.03 mg/kg, 0.1 mg/kg, 0.3 mg/kg, 1 mg/kg, 3 mg/kg, 10 mg/kg, or 20 mg/kg, and wherein the stable liquid formulation of the anti-PVRIG antibody comprises:
[1146] (a) an anti-PVRIG antibody comprising:
   [1147] i) a heavy chain comprising:
      [1148] a) a VH-CH1-hinge-CH2-CH3, wherein the VH is from CHA.7.518.1.H4(S241P) (SEQ ID NO:4) and wherein the CH1-hinge-CH2-CH3 region is from IgG4; and
   [1149] ii) a light chain comprising:
      [1150] a) a VL-CL, wherein the VL from CHA.7.518.1.H4(S241P) (SEQ ID NO:9) and wherein the CL region is from human kappa 2 light chain;
[1151] (b) about 25 mM histidine;
[1152] (c) about 60 mM NaCl;
[1153] (d) about 100 mM L-Arginine; and
[1154] (e) about 0.01% % w/v polysorbate 80,
[1155] wherein the composition has a pH from 6.5+/−0.2.

[1156] In some embodiments, the present invention provides for treatment of cancer in a subject in need thereof by administration of a stable liquid pharmaceutical formulation of an anti-PVRIG antibody, wherein the anti-PVRIG antibody is administered at a dosage of about 0.01 mg/kg, 0.03 mg/kg, 0.1 mg/kg, 0.3 mg/kg, 1 mg/kg, 3 mg/kg, 10 mg/kg, or 20 mg/kg, and wherein the stable liquid formulation of the anti-PVRIG antibody comprises:
[1157] (a) an anti-PVRIG antibody comprising:
   [1158] i) a heavy chain comprising the heavy chain from CHA.7.518.1.H4(S241P) (SEQ ID NO:8); and
   [1159] ii) a light chain comprising the light chain from CHA.7.518.1.H4(S241P) (SEQ ID NO:13);
[1160] (b) from 10 mM to 100 mM histidine;
[1161] (c) from 30 mM to 100 mM NaCl;
[1162] (d) from 20 mM to 150 mM L-Arginine; and
[1163] (e) from 0.005% to 0.1% w/v polysorbate 80,
[1164] wherein the composition has a pH from 5.5 to 7.0.

[1165] In some embodiments, the present invention provides for treatment of cancer in a subject in need thereof by administration of a stable liquid pharmaceutical formulation of an anti-PVRIG antibody, wherein the anti-PVRIG antibody is administered at a dosage of about 0.01 mg/kg, 0.03 mg/kg, 0.1 mg/kg, 0.3 mg/kg, 1 mg/kg, 3 mg/kg, 10 mg/kg, or 20 mg/kg, and wherein the stable liquid formulation of the anti-PVRIG antibody comprises:
[1166] (a) an anti-PVRIG antibody comprising:
   [1167] i) a heavy chain comprising the heavy chain from CHA.7.518.1.H4(S241P) (SEQ ID NO:8); and
   [1168] ii) a light chain comprising the light chain from CHA.7.518.1.H4(S241P) (SEQ ID NO:13);
[1169] (b) about 25 mM histidine;
[1170] (c) about 60 mM NaCl;
[1171] (d) about 100 mM L-Arginine; and
[1172] (e) about 0.01% % w/v polysorbate 80,
[1173] wherein the composition has a pH from 6.5+/−0.2.

[1174] 3. Selected Combination Treatment with Formulation Embodiments

[1175] In some embodiments, the present invention provides for treatment of cancer in a subject in need thereof by administration of an anti-TIGIT and/or and an anti-PD1 and a stable liquid pharmaceutical formulation of an anti-PVRIG antibody, wherein the anti-PVRIG antibody is administered at a dosage of about 0.01 mg/kg, 0.03 mg/kg, 0.1 mg/kg, 0.3 mg/kg, 1 mg/kg, 3 mg/kg, 10 mg/kg, or 20 mg/kg, and wherein the stable liquid formulation of the anti-PVRIG antibody comprises:
[1176] (a) an anti-PVRIG antibody comprising:
   [1177] i) a heavy chain variable domain comprising the vhCDR1, vhCDR2, and vhCDR3 from the heavy chain of CHA.7.518.1.H4(S241P) (SEQ ID NO:4), and
   [1178] ii) a light chain variable domain comprising the vlCDR1, vlCDR2, and vlCDR3 from the light chain of CHA.7.518.1.H4(S241P) (SEQ ID NO:9);
[1179] (b) from 10 mM to 100 mM histidine;
[1180] (c) from 30 mM to 100 mM NaCl;
[1181] (d) from 20 mM to 150 mM L-Arginine; and
[1182] (e) from 0.005% to 0.1% w/v polysorbate 80,
[1183] wherein the composition has a pH from 5.5 to 7.0.

[1184] In some embodiments, the anti-PD1 is selected from the group consisting of nivolumab, pembrolizumab, BMS-936558/MDX-1106/ONO-4538, AMP224, CT-011, MK-3475

[1185] In some embodiments, the invention provides the specific combinations of: CHA.7.518.1.H4(S241P) with pembrolizumab; CHA.7.518.1.H4(S241P) with nivolumab; CHA.7.538.1.2.H4(S241P) with pembrolizumab and CHA.7.538.1.2.H4(S241P) with nivolumab.

[1186] In some embodiments, the present invention provides for treatment of cancer in a subject in need thereof by administration of nivolumab and a stable liquid pharmaceutical formulation of an anti-PVRIG antibody, wherein the anti-PVRIG antibody is administered at a dosage of about 0.01 mg/kg, 0.03 mg/kg, 0.1 mg/kg, 0.3 mg/kg, 1 mg/kg, 3 mg/kg, 10 mg/kg, or 20 mg/kg, and wherein the stable liquid formulation of the anti-PVRIG antibody comprises:
[1187] (a) an anti-PVRIG antibody comprising:
   [1188] i) a heavy chain variable domain comprising the vhCDR1, vhCDR2, and vhCDR3 from the heavy chain of CHA.7.518.1.H4(S241P) (SEQ ID NO:4), and
   [1189] ii) a light chain variable domain comprising the vlCDR1, vlCDR2, and vlCDR3 from the light chain of CHA.7.518.1.H4(S241P) (SEQ ID NO:9).
[1190] (a) an anti-PVRIG antibody;
[1191] (b) about 25 mM histidine;
[1192] (c) about 60 mM NaCl;
[1193] (d) about 100 mM L-Arginine; and
[1194] (e) about 0.01% % w/v polysorbate 80,
[1195] wherein the composition has a pH from 6.5+/−0.2.

[1196] In some embodiments, the present invention provides for treatment of cancer in a subject in need thereof by administration of nivolumab and a stable liquid pharmaceutical formulation of an anti-PVRIG antibody, wherein the anti-PVRIG antibody is administered at a dosage of about 0.01 mg/kg, 0.03 mg/kg, 0.1 mg/kg, 0.3 mg/kg, 1 mg/kg, 3 mg/kg, 10 mg/kg, or 20 mg/kg, and wherein the stable liquid formulation of the anti-PVRIG antibody comprises:
[1197] (a) an anti-PVRIG antibody comprising:
   [1198] i) heavy chain variable domain is from the heavy chain of CHA.7.518.1.H4(S241P) (SEQ ID NO:4), and
   [1199] ii) a light chain variable domain is from the light chain of CHA.7.518.1.H4(S241P) (SEQ ID NO:9);
[1200] (b) from 10 mM to 100 mM histidine;
[1201] (c) from 30 mM to 100 mM NaCl;
[1202] (d) from 20 mM to 150 mM L-Arginine; and
[1203] (e) from 0.005% to 0.1% w/v polysorbate 80,
[1204] wherein the composition has a pH from 5.5 to 7.0.

[1205] In some embodiments, the present invention provides for treatment of cancer in a subject in need thereof by administration of nivolumab and a stable liquid pharmaceutical formulation of an anti-PVRIG antibody, wherein the anti-PVRIG antibody is administered at a dosage of about 0.01 mg/kg, 0.03 mg/kg, 0.1 mg/kg, 0.3 mg/kg, 1 mg/kg, 3 mg/kg, 10 mg/kg, or 20 mg/kg, and wherein the stable liquid formulation of the anti-PVRIG antibody comprises:
[1206] (a) an anti-PVRIG antibody comprising:
   [1207] i) heavy chain variable domain is from the heavy chain of CHA.7.518.1.H4(S241P) (SEQ ID NO:4), and
   [1208] ii) a light chain variable domain is from the light chain of CHA.7.518.1.H4(S241P) (SEQ ID NO:9);
[1209] (b) about 25 mM histidine;
[1210] (c) about 60 mM NaCl;
[1211] (d) about 100 mM L-Arginine; and
[1212] (e) about 0.01% % w/v polysorbate 80,
[1213] wherein the composition has a pH from 6.5+/−0.2.

[1214] In some embodiments, the present invention provides for treatment of cancer in a subject in need thereof by administration of nivolumab and a stable liquid pharmaceutical formulation of an anti-PVRIG antibody, wherein the anti-PVRIG antibody is administered at a dosage of about 0.01 mg/kg, 0.03 mg/kg, 0.1 mg/kg, 0.3 mg/kg, 1 mg/kg, 3 mg/kg, 10 mg/kg, or 20 mg/kg, and wherein the stable liquid formulation of the anti-PVRIG antibody comprises:
[1215] (a) an anti-PVRIG antibody comprising:
   [1216] i) a heavy chain comprising:
      [1217] a) a VH-CH1-hinge-CH2-CH3, wherein the VH is from CHA.7.518.1.H4(S241P) (SEQ ID NO:4) and wherein the CH1-hinge-CH2-CH3 region is from IgG4; and
   [1218] ii) a light chain comprising:
      [1219] a) a VL-CL, wherein the VL from CHA.7.518.1.H4(S241P) (SEQ ID NO:9) and wherein the CL region is from human kappa 2 light chain;
[1220] (b) from 10 mM to 100 mM histidine;
[1221] (c) from 30 mM to 100 mM NaCl;
[1222] (d) from 20 mM to 150 mM L-Arginine; and
[1223] (e) from 0.005% to 0.1% w/v polysorbate 80,
[1224] wherein the composition has a pH from 5.5 to 7.0.

[1225] In some embodiments, the present invention provides for treatment of cancer in a subject in need thereof by administration of nivolumab and a stable liquid pharmaceutical formulation of an anti-PVRIG antibody, wherein the anti-PVRIG antibody is administered at a dosage of about 0.01 mg/kg, 0.03 mg/kg, 0.1 mg/kg, 0.3 mg/kg, 1 mg/kg, 3 mg/kg, 10 mg/kg, or 20 mg/kg, and wherein the stable liquid formulation of the anti-PVRIG antibody comprises:
[1226] (a) an anti-PVRIG antibody comprising:
   [1227] i) a heavy chain comprising:
      [1228] a) a VH-CH1-hinge-CH2-CH3, wherein the VH is from CHA.7.518.1.H4(S241P) (SEQ ID NO:4) and wherein the CH1-hinge-CH2-CH3 region is from IgG4; and
   [1229] ii) a light chain comprising:
      [1230] a) a VL-CL, wherein the VL from CHA.7.518.1.H4(S241P) (SEQ ID NO:9) and wherein the CL region is from human kappa 2 light chain;
[1231] (b) about 25 mM histidine;
[1232] (c) about 60 mM NaCl;
[1233] (d) about 100 mM L-Arginine; and
[1234] (e) about 0.01% % w/v polysorbate 80,
[1235] wherein the composition has a pH from 6.5+/−0.2.

[1236] In some embodiments, the present invention provides for treatment of cancer in a subject in need thereof by administration of nivolumab and a stable liquid pharmaceutical formulation of an anti-PVRIG antibody, wherein the anti-PVRIG antibody is administered at a dosage of about 0.01 mg/kg, 0.03 mg/kg, 0.1 mg/kg, 0.3 mg/kg, 1 mg/kg, 3 mg/kg, 10 mg/kg, or 20 mg/kg, and wherein the stable liquid formulation of the anti-PVRIG antibody comprises:
[1237] (a) an anti-PVRIG antibody comprising:
   [1238] i) a heavy chain comprising the heavy chain from CHA.7.518.1.H4(S241P) (SEQ ID NO:8); and
   [1239] ii) a light chain comprising the light chain from CHA.7.518.1.H4(S241P) (SEQ ID NO:13);
[1240] (b) from 10 mM to 100 mM histidine;
[1241] (c) from 30 mM to 100 mM NaCl;
[1242] (d) from 20 mM to 150 mM L-Arginine; and
[1243] (e) from 0.005% to 0.1% w/v polysorbate 80,
[1244] wherein the composition has a pH from 5.5 to 7.0.

[1245] In some embodiments, the present invention provides for treatment of cancer in a subject in need thereof by administration of nivolumab and a stable liquid pharmaceutical formulation of an anti-PVRIG antibody, wherein the anti-PVRIG antibody is administered at a dosage of about 0.01 mg/kg, 0.03 mg/kg, 0.1 mg/kg, 0.3 mg/kg, 1 mg/kg, 3 mg/kg, 10 mg/kg, or 20 mg/kg, and wherein the stable liquid formulation of the anti-PVRIG antibody comprises:
[1246] (a) an anti-PVRIG antibody comprising:
   [1247] i) a heavy chain comprising the heavy chain from CHA.7.518.1.H4(S241P) (SEQ ID NO:8); and
   [1248] ii) a light chain comprising the light chain from CHA.7.518.1.H4(S241P) (SEQ ID NO:13);
[1249] (b) about 25 mM histidine;
[1250] (c) about 60 mM NaCl;
[1251] (d) about 100 mM L-Arginine; and
[1252] (e) about 0.01% % w/v polysorbate 80,
[1253] wherein the composition has a pH from 6.5+/−0.2.

[1254] In some embodiments, the present invention provides for treatment of cancer in a subject in need thereof by administration of 360 mg nivolumab and a stable liquid pharmaceutical formulation of an anti-PVRIG antibody, wherein the anti-PVRIG antibody is administered at a dosage of about 0.01 mg/kg, 0.03 mg/kg, 0.1 mg/kg, 0.3 mg/kg, 1 mg/kg, 3 mg/kg, 10 mg/kg, or 20 mg/kg, and wherein the stable liquid formulation of the anti-PVRIG antibody comprises:
[1255] (a) an anti-PVRIG antibody comprising:
   [1256] i) a heavy chain variable domain comprising the vhCDR1, vhCDR2, and vhCDR3 from the heavy chain of CHA.7.518.1.H4(S241P) (SEQ ID NO:4), and
   [1257] ii) a light chain variable domain comprising the vlCDR1, vlCDR2, and vlCDR3 from the light chain of CHA.7.518.1.H4(S241P) (SEQ ID NO:9);
[1258] (b) from 10 mM to 100 mM histidine;
[1259] (c) from 30 mM to 100 mM NaCl;
[1260] (d) from 20 mM to 150 mM L-Arginine; and
[1261] (e) from 0.005% to 0.1% w/v polysorbate 80,
[1262] wherein the composition has a pH from 5.5 to 7.0.

[1263] In some embodiments, the present invention provides for treatment of cancer in a subject in need thereof by administration of 360 mg nivolumab and a stable liquid pharmaceutical formulation of an anti-PVRIG antibody, wherein the anti-PVRIG antibody is administered at a dosage of about 0.01 mg/kg, 0.03 mg/kg, 0.1 mg/kg, 0.3 mg/kg, 1 mg/kg, 3 mg/kg, 10 mg/kg, or 20 mg/kg, and wherein the stable liquid formulation of the anti-PVRIG antibody comprises:
[1264] (a) an anti-PVRIG antibody comprising:
   [1265] i) a heavy chain variable domain comprising the vhCDR1, vhCDR2, and vhCDR3 from the heavy chain of CHA.7.518.1.H4(S241P) (SEQ ID NO:4), and
   [1266] ii) a light chain variable domain comprising the vlCDR1, vlCDR2, and vlCDR3 from the light chain of CHA.7.518.1.H4(S241P) (SEQ ID NO:9).
[1267] (b) about 25 mM histidine;
[1268] (c) about 60 mM NaCl;
[1269] (d) about 100 mM L-Arginine; and
[1270] (e) about 0.01% % w/v polysorbate 80,
[1271] wherein the composition has a pH from 6.5+/−0.2.

[1272] In some embodiments, the present invention provides for treatment of cancer in a subject in need thereof by administration of 360 mg nivolumab and a stable liquid pharmaceutical formulation of an anti-PVRIG antibody, wherein the anti-PVRIG antibody is administered at a dosage of about 0.01 mg/kg, 0.03 mg/kg, 0.1 mg/kg, 0.3 mg/kg, 1 mg/kg, 3 mg/kg, 10 mg/kg, or 20 mg/kg, and wherein the stable liquid formulation of the anti-PVRIG antibody comprises:
[1273] (a) an anti-PVRIG antibody comprising:
   [1274] i) heavy chain variable domain is from the heavy chain of CHA.7.518.1.H4(S241P) (SEQ ID NO:4), and
   [1275] ii) a light chain variable domain is from the light chain of CHA.7.518.1.H4(S241P) (SEQ ID NO:9);
[1276] (b) from 10 mM to 100 mM histidine;
[1277] (c) from 30 mM to 100 mM NaCl;
[1278] (d) from 20 mM to 150 mM L-Arginine; and
[1279] (e) from 0.005% to 0.1% w/v polysorbate 80,
[1280] wherein the composition has a pH from 5.5 to 7.0.

[1281] In some embodiments, the present invention provides for treatment of cancer in a subject in need thereof by administration of 360 mg nivolumab and a stable liquid pharmaceutical formulation of an anti-PVRIG antibody, wherein the anti-PVRIG antibody is administered at a dosage of about 0.01 mg/kg, 0.03 mg/kg, 0.1 mg/kg, 0.3 mg/kg, 1 mg/kg, 3 mg/kg, 10 mg/kg, or 20 mg/kg, and wherein the stable liquid formulation of the anti-PVRIG antibody comprises:
[1282] (a) an anti-PVRIG antibody comprising:
   [1283] i) heavy chain variable domain is from the heavy chain of CHA.7.518.1.H4(S241P) (SEQ ID NO:4), and
   [1284] ii) a light chain variable domain is from the light chain of CHA.7.518.1.H4(S241P) (SEQ ID NO:9);
[1285] (b) about 25 mM histidine;
[1286] (c) about 60 mM NaCl;
[1287] (d) about 100 mM L-Arginine; and
[1288] (e) about 0.01% % w/v polysorbate 80,
[1289] wherein the composition has a pH from 6.5+/−0.2.

[1290] In some embodiments, the present invention provides for treatment of cancer in a subject in need thereof by administration of 360 mg nivolumab and a stable liquid pharmaceutical formulation of an anti-PVRIG antibody, wherein the anti-PVRIG antibody is administered at a dosage of about 0.01 mg/kg, 0.03 mg/kg, 0.1 mg/kg, 0.3 mg/kg, 1 mg/kg, 3 mg/kg, 10 mg/kg, or 20 mg/kg, and wherein the stable liquid formulation of the anti-PVRIG antibody comprises:
[1291] (a) an anti-PVRIG antibody comprising:
   [1292] i) a heavy chain comprising:
      [1293] a) a VH-CH1-hinge-CH2-CH3, wherein the VH is from CHA.7.518.1.H4(S241P) (SEQ ID NO:4) and wherein the CH1-hinge-CH2-CH3 region is from IgG4; and
   [1294] ii) a light chain comprising:
      [1295] a) a VL-CL, wherein the VL from CHA.7.518.1.H4(S241P) (SEQ ID NO:9) and wherein the CL region is from human kappa 2 light chain;
[1296] (b) from 10 mM to 100 mM histidine;
[1297] (c) from 30 mM to 100 mM NaCl;
[1298] (d) from 20 mM to 150 mM L-Arginine; and
[1299] (e) from 0.005% to 0.1% w/v polysorbate 80,
[1300] wherein the composition has a pH from 5.5 to 7.0.

[1301] In some embodiments, the present invention provides for treatment of cancer in a subject in need thereof by administration of 360 mg nivolumab and a stable liquid pharmaceutical formulation of an anti-PVRIG antibody, wherein the anti-PVRIG antibody is administered at a dosage of about 0.01 mg/kg, 0.03 mg/kg, 0.1 mg/kg, 0.3 mg/kg, 1 mg/kg, 3 mg/kg, 10 mg/kg, or 20 mg/kg, and wherein the stable liquid formulation of the anti-PVRIG antibody comprises:
[1302] (a) an anti-PVRIG antibody comprising:
   [1303] i) a heavy chain comprising:
      [1304] a) a VH-CH1-hinge-CH2-CH3, wherein the VH is from CHA.7.518.1.H4(S241P) (SEQ ID NO:4) and wherein the CH1-hinge-CH2-CH3 region is from IgG4; and
   [1305] ii) a light chain comprising:
      [1306] a) a VL-CL, wherein the VL from CHA.7.518.1.H4(S241P) (SEQ ID NO:9) and wherein the CL region is from human kappa 2 light chain;
[1307] (b) about 25 mM histidine;
[1308] (c) about 60 mM NaCl;
[1309] (d) about 100 mM L-Arginine; and
[1310] (e) about 0.01% % w/v polysorbate 80,
[1311] wherein the composition has a pH from 6.5+/−0.2.

[1312] In some embodiments, the present invention provides for treatment of cancer in a subject in need thereof by administration of 360 mg nivolumab and a stable liquid pharmaceutical formulation of an anti-PVRIG antibody, wherein the anti-PVRIG antibody is administered at a dosage of about 0.01 mg/kg, 0.03 mg/kg, 0.1 mg/kg, 0.3 mg/kg, 1 mg/kg, 3 mg/kg, 10 mg/kg, or 20 mg/kg, and wherein the stable liquid formulation of the anti-PVRIG antibody comprises:
[1313] (a) an anti-PVRIG antibody comprising:
   [1314] i) a heavy chain comprising the heavy chain from CHA.7.518.1.H4(S241P) (SEQ ID NO:8); and
   [1315] ii) a light chain comprising the light chain from CHA.7.518.1.H4(S241P) (SEQ ID NO:13);
[1316] (b) from 10 mM to 100 mM histidine;
[1317] (c) from 30 mM to 100 mM NaCl;
[1318] (d) from 20 mM to 150 mM L-Arginine; and
[1319] (e) from 0.005% to 0.1% w/v polysorbate 80,
[1320] wherein the composition has a pH from 5.5 to 7.0.

[1321] In some embodiments, the present invention provides for treatment of cancer in a subject in need thereof by administration of 360 mg nivolumab and a stable liquid pharmaceutical formulation of an anti-PVRIG antibody, wherein the anti-PVRIG antibody is administered at a dosage of about 0.01 mg/kg, 0.03 mg/kg, 0.1 mg/kg, 0.3 mg/kg, 1 mg/kg, 3 mg/kg, 10 mg/kg, or 20 mg/kg, and wherein the stable liquid formulation of the anti-PVRIG antibody comprises:
[1322] (a) an anti-PVRIG antibody comprising:
   [1323] i) a heavy chain comprising the heavy chain from CHA.7.518.1.H4(S241P) (SEQ ID NO:8); and
   [1324] ii) a light chain comprising the light chain from CHA.7.518.1.H4(S241P) (SEQ ID NO:13);
[1325] (b) about 25 mM histidine;
[1326] (c) about 60 mM NaCl;
[1327] (d) about 100 mM L-Arginine; and
[1328] (e) about 0.01% % w/v polysorbate 80,
   wherein the composition has a pH from 6.5+/−0.2.

[1329] In some embodiments, the present invention provides for treatment of cancer in a subject in need thereof by administration of 480 mg nivolumab and a stable liquid pharmaceutical formulation of an anti-PVRIG antibody, wherein the anti-PVRIG antibody is administered at a dosage of about 0.01 mg/kg, 0.03 mg/kg, 0.1 mg/kg, 0.3 mg/kg, 1 mg/kg, 3 mg/kg, 10 mg/kg, or 20 mg/kg, and wherein the stable liquid formulation of the anti-PVRIG antibody comprises:
[1330] (a) an anti-PVRIG antibody comprising:
   [1331] i) a heavy chain variable domain comprising the vhCDR1, vhCDR2, and vhCDR3 from the heavy chain of CHA.7.518.1.H4(S241P) (SEQ ID NO:4), and
   [1332] ii) a light chain variable domain comprising the vlCDR1, vlCDR2, and vlCDR3 from the light chain of CHA.7.518.1.H4(S241P) (SEQ ID NO:9);
[1333] (b) from 10 mM to 100 mM histidine;
[1334] (c) from 30 mM to 100 mM NaCl;
[1335] (d) from 20 mM to 150 mM L-Arginine; and
[1336] (e) from 0.005% to 0.1% w/v polysorbate 80,
[1337] wherein the composition has a pH from 5.5 to 7.0.

[1338] In some embodiments, the present invention provides for treatment of cancer in a subject in need thereof by administration of 480 mg nivolumab and a stable liquid pharmaceutical formulation of an anti-PVRIG antibody, wherein the anti-PVRIG antibody is administered at a dosage of about 0.01 mg/kg, 0.03 mg/kg, 0.1 mg/kg, 0.3 mg/kg, 1 mg/kg, 3 mg/kg, 10 mg/kg, or 20 mg/kg, and wherein the stable liquid formulation of the anti-PVRIG antibody comprises:
[1339] (a) an anti-PVRIG antibody comprising:
   [1340] i) a heavy chain variable domain comprising the vhCDR1, vhCDR2, and vhCDR3 from the heavy chain of CHA.7.518.1.H4(S241P) (SEQ ID NO:4), and
   [1341] ii) a light chain variable domain comprising the vlCDR1, vlCDR2, and vlCDR3 from the light chain of CHA.7.518.1.H4(S241P) (SEQ ID NO:9).
[1342] (b) about 25 mM histidine;
[1343] (c) about 60 mM NaCl;
[1344] (d) about 100 mM L-Arginine; and
[1345] (e) about 0.01% % w/v polysorbate 80,
[1346] wherein the composition has a pH from 6.5+/−0.2.

[1347] In some embodiments, the present invention provides for treatment of cancer in a subject in need thereof by administration of 480 mg nivolumab and a stable liquid pharmaceutical formulation of an anti-PVRIG antibody, wherein the anti-PVRIG antibody is administered at a dosage of about 0.01 mg/kg, 0.03 mg/kg, 0.1 mg/kg, 0.3 mg/kg, 1 mg/kg, 3 mg/kg, 10 mg/kg, or 20 mg/kg, and wherein the stable liquid formulation of the anti-PVRIG antibody comprises:
[1348] (a) an anti-PVRIG antibody comprising:
   [1349] i) heavy chain variable domain is from the heavy chain of CHA.7.518.1.H4(S241P) (SEQ ID NO:4), and
   [1350] ii) a light chain variable domain is from the light chain of CHA.7.518.1.H4(S241P) (SEQ ID NO:9);
[1351] (b) from 10 mM to 100 mM histidine;
[1352] (c) from 30 mM to 100 mM NaCl;
[1353] (d) from 20 mM to 150 mM L-Arginine; and
[1354] (e) from 0.005% to 0.1% w/v polysorbate 80,
[1355] wherein the composition has a pH from 5.5 to 7.0.

[1356] In some embodiments, the present invention provides for treatment of cancer in a subject in need thereof by administration of 480 mg nivolumab and a stable liquid pharmaceutical formulation of an anti-PVRIG antibody, wherein the anti-PVRIG antibody is administered at a dosage of about 0.01 mg/kg, 0.03 mg/kg, 0.1 mg/kg, 0.3 mg/kg, 1 mg/kg, 3 mg/kg, 10 mg/kg, or 20 mg/kg, and wherein the stable liquid formulation of the anti-PVRIG antibody comprises:
[1357] (a) an anti-PVRIG antibody comprising:
   [1358] i) heavy chain variable domain is from the heavy chain of CHA.7.518.1.H4(S241P) (SEQ ID NO:4), and
   [1359] ii) a light chain variable domain is from the light chain of CHA.7.518.1.H4(S241P) (SEQ ID NO:9);
[1360] (b) about 25 mM histidine;
[1361] (c) about 60 mM NaCl;
[1362] (d) about 100 mM L-Arginine; and
[1363] (e) about 0.01% % w/v polysorbate 80,
[1364] wherein the composition has a pH from 6.5+/−0.2.

[1365] In some embodiments, the present invention provides for treatment of cancer in a subject in need thereof by administration of 480 mg nivolumab and a stable liquid pharmaceutical formulation of an anti-PVRIG antibody, wherein the anti-PVRIG antibody is administered at a dosage of about 0.01 mg/kg, 0.03 mg/kg, 0.1 mg/kg, 0.3 mg/kg, 1 mg/kg, 3 mg/kg, 10 mg/kg, or 20 mg/kg, and wherein the stable liquid formulation of the anti-PVRIG antibody comprises:
[1366] (a) an anti-PVRIG antibody comprising:
   [1367] i) a heavy chain comprising:
      [1368] a) a VH-CH1-hinge-CH2-CH3, wherein the VH is from CHA.7.518.1.H4(S241P) (SEQ ID NO:4) and wherein the CH1-hinge-CH2-CH3 region is from IgG4; and
   [1369] ii) a light chain comprising:
      [1370] a) a VL-CL, wherein the VL from CHA.7.518.1.H4(S241P) (SEQ ID NO:9) and wherein the CL region is from human kappa 2 light chain;
[1371] (b) from 10 mM to 100 mM histidine;
[1372] (c) from 30 mM to 100 mM NaCl;
[1373] (d) from 20 mM to 150 mM L-Arginine; and
[1374] (e) from 0.005% to 0.1% w/v polysorbate 80,
[1375] wherein the composition has a pH from 5.5 to 7.0.

[1376] In some embodiments, the present invention provides for treatment of cancer in a subject in need thereof by administration of 480 mg nivolumab and a stable liquid pharmaceutical formulation of an anti-PVRIG antibody, wherein the anti-PVRIG antibody is administered at a dosage of about 0.01 mg/kg, 0.03 mg/kg, 0.1 mg/kg, 0.3 mg/kg, 1 mg/kg, 3 mg/kg, 10 mg/kg, or 20 mg/kg, and wherein the stable liquid formulation of the anti-PVRIG antibody comprises:
[1377] (a) an anti-PVRIG antibody comprising:
   [1378] i) a heavy chain comprising:
      [1379] a) a VH-CH1-hinge-CH2-CH3, wherein the VH is from CHA.7.518.1.H4(S241P) (SEQ ID NO:4) and wherein the CH1-hinge-CH2-CH3 region is from IgG4; and
   [1380] ii) a light chain comprising:
      [1381] a) a VL-CL, wherein the VL from CHA.7.518.1.H4(S241P) (SEQ ID NO:9) and wherein the CL region is from human kappa 2 light chain;
[1382] (b) about 25 mM histidine;
[1383] (c) about 60 mM NaCl;
[1384] (d) about 100 mM L-Arginine; and
[1385] (e) about 0.01% % w/v polysorbate 80,
[1386] wherein the composition has a pH from 6.5+/−0.2.

[1387] In some embodiments, the present invention provides for treatment of cancer in a subject in need thereof by administration of 480 mg nivolumab and a stable liquid pharmaceutical formulation of an anti-PVRIG antibody, wherein the anti-PVRIG antibody is administered at a dosage of about 0.01 mg/kg, 0.03 mg/kg, 0.1 mg/kg, 0.3 mg/kg, 1 mg/kg, 3 mg/kg, 10 mg/kg, or 20 mg/kg, and wherein the stable liquid formulation of the anti-PVRIG antibody comprises:
[1388] (a) an anti-PVRIG antibody comprising:
   [1389] i) a heavy chain comprising the heavy chain from CHA.7.518.1.H4(S241P) (SEQ ID NO:8); and
   [1390] ii) a light chain comprising the light chain from CHA.7.518.1.H4(S241P) (SEQ ID NO:13);
[1391] (b) from 10 mM to 100 mM histidine;
[1392] (c) from 30 mM to 100 mM NaCl;
[1393] (d) from 20 mM to 150 mM L-Arginine; and
[1394] (e) from 0.005% to 0.1% w/v polysorbate 80,
[1395] wherein the composition has a pH from 5.5 to 7.0.

[1396] In some embodiments, the present invention provides for treatment of cancer in a subject in need thereof by administration of 480 mg nivolumab and a stable liquid pharmaceutical formulation of an anti-PVRIG antibody, wherein the anti-PVRIG antibody is administered at a dosage of about 0.01 mg/kg, 0.03 mg/kg, 0.1 mg/kg, 0.3 mg/kg, 1 mg/kg, 3 mg/kg, 10 mg/kg, or 20 mg/kg, and wherein the stable liquid formulation of the anti-PVRIG antibody comprises:
[1397] (a) an anti-PVRIG antibody comprising:
   [1398] i) a heavy chain comprising the heavy chain from CHA.7.518.1.H4(S241P) (SEQ ID NO:8); and
   [1399] ii) a light chain comprising the light chain from CHA.7.518.1.H4(S241P) (SEQ ID NO:13);
[1400] (b) about 25 mM histidine;
[1401] (c) about 60 mM NaCl;
[1402] (d) about 100 mM L-Arginine; and
[1403] (e) about 0.01% % w/v polysorbate 80,
[1404] wherein the composition has a pH from 6.5+/−0.2.

### LIST OF EMBODIMENTS

[1405] In one aspect, the present invention disclosed herein provides for the following:

### EXAMPLES

[1406] The embodiments encompassed herein are now described with reference to the following examples. These examples are provided for the purpose of illustration only and the disclosure encompassed herein should in no way be construed as being limited to these examples, but rather should be construed to encompass any and all variations which become evident as a result of the teachings provided herein.

### Example 1: Assessment of PVRIG and/or PVRL2 Expression Using IHC

### Determination of PVRIG/PVRL2 Expression Using Immunohistochemistry (IHC)

[1407] PVRIG and/or PVRL2 expression can be determined, for example, using IHC, Immunofluorescence, RNAscope, etc., and used to identify the patient who is predicted to have an increase likelihood of being responsive to treatment with an anti-PVRIG antibody, relative to a patient who does not express the biomarker at the same level and or relative to a patient that does not have the presence of the biomarker.

[1408] Antibodies used for IHC included:
[1409] AB-635 PVRIG Ab (6D8-1 clone, by GenScript)
[1410] The CST PVRL2 Ab, Nectin-2/CD112 (D8D3F) XP® Rabbit mAb, is rabbit monoclonal Ab; cat number 95333.

### Monoclonal Antibody Sequencing of Hybridoma 6D8-1

[1411] Antibody sequences of 6D8-1 are listed as below:

Heavy chain: DNA sequence (414 bp)
Leader sequence-FR1-CDR1-FR2-CDR2-FR3-CDR3-FR4
(SEQ ID NO: 1317)
GACGTGAAGTTCGTGGAGTCTGGGGGAGGCTTAGTGAAGGTTGG
AGGGTCCCTGAAACTCTCCTGTGCAGCCTCTGGATTCACTTTCAGTACC
TATTACATGTCTTGGGTTCGCCAGACTCCAGAGAAGAGGCTGGAGTTGG
TCGCAGTCATTAATCCTACTGGTGGTAGAACCGACTTTCTAGACAGTGT
GAGGGGCCGATTCACCATTTCCAGAGACAATGCCAAGAACACCCTGTAC
CTGCAAATGACCAGTCTGAAGTCTGAGGACACAGCCTTGTATCACTGTG
CAAGACGGGGGGAGTTGGGACGGGCTCTGGACTACTGGGGTCAAGGGAC
CTCAGTCACCGTCTCCTCA
Heavy chain: Amino acids sequence (138 aa)
Leader sequence-FR1-CDR1-FR2-CDR2-FR3-CDR3-FR4
(SEQ ID NO: 1318)
DVKFVESGGGLVKVGGSLKLSCAASGFTFSTYY
MSWVRQTPEKRLELVAVINPTGGRTDELDSVRGRFTISRDNAKNTLYL
QMTSLKSEDTALYHCARRGELGRALDYWGQGTSVTVSS
Light chain: DNA sequence (393 bp)
Leader sequence-FR1-CDR1-FR2-CDR2-FR3-CDR3-FR4
(SEQ ID NO: 1319)
AACATTGTGCTGACCCAATTTCCAGCTTCTTTGGCTGTGTC
TCTAGGACAGAGGGCCTCCATATCCTGCAGAGCCAGTGAAAGTGTTGAT
AGTTATGGCTATAGTTTTATTCACTGGTACCAGCAGAAGCCAGGACAGC
CACCCAAACTCCTCATCTATCTTGCATCCAGCCTAGAATCTGGGGTCCC
TGCCAGGTTCAGTGGCAGTGGGTCTAGGACAGACTTCACCCTCACCATT
GATCCTGTGGAGGCTAATGATGCTGCAACCTATTACTGTCAGCAGAATA
ATGGGGATCCGTGGACGTTCGGTGGAGGCACCAAGCTGGAAATCAAA
Light chain: Amino acids sequence (131 aa)
Leader sequence-FR1-CDR1-FR2-CDR2-FR3-CDR3-FR4
(SEQ ID NO: 1320)
NIVLTQFPASLAVSLGQRASISCRASESV
DSYGYSFIHWYQQKPGQPPKLLIYLASSLESGVPARFSGSGSRTDFTLT
IDPVEANDAATYYCQQNNGDPWTFGGGTKLEIK

TABLE 4
Sequence Information

| | Clones | Clones with >99% |
|---|---|---|
| Sequence | sequenced | sequence identity |
| VH | 5 | 5 |
| VL | 5 | 5 |

TABLE 4
IMGT Analysis of V(D)J Junctions.
Table 5

| | | | V-REGION | | | | Junction |
|---|---|---|---|---|---|---|---|
| Sequence | V-GENE and allele | Functionality | identity % (nt) | J-GENE and allele | D-GENE and allele | AA Junction | frame |
| VH | MusmusIGHV5- | productive | 94.44% | MusmusIGHJ4*01 F | MusmusIGHD3-3*01F | CARRGELGRALDYW | in-frame |
| | 6-2*0 = 1 F | | (272/288 nt) | | | | |
| VL | MusmusIGKV3- | productive | 96.56% | MusmusIGKJ1*01 F | — | CQQNNGDPWTF | in-frame |
| | 10*01 F | | (281/291 nt) | | | | |

[1412] Materials
[1413] Hybridoma cells provided by GenScript;
[1414] TRIzol® Reagent (Ambion, Cat. No.: 15596-026);
[1415] PrimeScript™ 1st Strand cDNA Synthesis Kit (Takara, Cat. No.: 6110A).

[1416] Methods
[1417] Total RNA was isolated from the hybridoma cells following the technical manual of TRIzol® Reagent. Total RNA was then reverse transcribed into cDNA using isotype-specific anti-sense primers or universal primers following the technical manual of PrimeScript™ 1st Strand cDNA Synthesis Kit. The antibody fragments of VH and VL were amplified according to the standard operating procedure (SOP) of rapid amplification of cDNA ends (RACE) of GenScript. Amplified antibody fragments were cloned into a standard cloning vector separately. Colony PCR was performed to screen for clones with inserts of correct sizes. No less than five colonies with inserts of correct sizes were sequenced for each fragment. The sequences of different clones were aligned and the consensus sequence of these clones was provided.

### Generation of Anti-PVRIG Antibody

[1418] Generation of mouse monoclonal antibodies against human PVRIG protein was performed at Genscript (USA).

[1419] Antibodies against human PVRIG protein were raised by immunizing group of 5 Balbc mice with protein fragment comprised from the intracellular domain (ICD) of PVRIG. The stages included the immunization, cell fusion and screening, subcloning and Abs production and purification.

[1420] Abs binding was tested on cells ectopically expressing human PVRIG as well as on several cell lines endogenously expressing PVRIG using deferent methods, western blot, ELISA and IHC.

[1421] Immunohistochemistry (IHC) Staining Using Anti-PVRIG Antibody

[1422] FFPEs slide tissues were treated with an antigen retrieval buffer (Trilogy Buffer), the tissues then stained with 3 ug/ml of mouse anti-human PVRIG monoclonal antibody, Clone AB-635 and a matched universal negative control antibody. An anti-mouse secondary antibody was used to detect anti-human PVRIG Ab or isotype bound to the tissue, and an HRP-polymer detection reagent was added for signal amplification.

[1423] Immunohistochemistry (IHC) Staining Using Anti-PVRL2 Antibody

[1424] FFPEs slide tissues were treated with an antigen retrieval buffer (Diva Decloaker, Heat-Induced Epitope Retrieval pH 6.2 Citrate-based buffer), the tissues then stained with 0.5 ug/ml of rabbit anti-human PVRL2 monoclonal antibody, Clone D8D3F and a matched universal negative control antibody. An anti-rabbit secondary antibody was used to detect anti-human PVRL2 Ab or isotype bound to the tissue, and an HRP-polymer detection reagent was added for signal amplification.

### PVRIG Diagnostic Assessment IHC Scores

[1425] Absence of any discernible PVRIG and/or PVRL2 staining IHC 0, or presence of discernible PVRIG and/or PVRL2 staining of any intensity in tumor-infiltrating immune cells identified or associated with intra/peri tumoral, and/or discernible staining in tumor immune aggregates and/or tertiary lymphoid structures.

### Scoring PVRIG Expression by IHC

[1426] The presence or absence of PVRIG expression in tumor specimens was evaluated as follows:

[1427] We used an anti-PVRIG-specific antibody (described in methods section), that can detect PVRIG in human formalin-fixed, paraffin-embedded (FFPE) tissues by IHC.

[1428] To measure and quantify relative expression of PVRIG in tumor samples, a PVRIG IHC scoring system was used (0—no signal, 1—low, 2—medium, 3—high) to measure PVRIG specific signal in tumor cells and tumor infiltrating immune cells, immune aggregates, and TLSs (Table 5 herein). Immune cells are defined as cells with lymphoid and/or macrophage/histiocyte morphology.

[1429] There was a wide dynamic range of PVRIG staining intensities in tumor tissues. The signal was also classified as strong, moderate, weak, or negative staining. PVRIG positive samples demonstrate primarily membranous staining in infiltrating immune cells, immune aggregates, and TLSs. PVRIG staining was observed with variable intensity from weak with fine, light-brown membranes to strong with dark-brown thick membranes easily recognized at low magnification. Representative PVRIG positive tumor samples include: ovary cancer, in which immune infiltrating cells and immune aggregates and TLSs showing clear staining for PVRIG in lymphoid cells, based on morphology (data not shown);

[1430] The staining in positive cases tends to be focal with respect to spatial distribution and intensity. The percentages immune cells showing staining of any intensity were visually estimated and used to determine PVRIG status (Table 6). An isotype negative control was used to evaluate the presence of background in test samples.

TABLE 6

| | PVRL2 | | | | | | | | | | PVRIG | | | | |
|---|---|---|---|---|---|---|---|---|---|---|---|---|---|---|---|
| | tumor score | | | | immune cell | immune score | | | | Expression | %(aboundent/ | immune score | | | |
| | 0 | 1 | 2 | 3 | present | 0 | 1 | 2 | 3 | in TLS | rare) | 0 | 1 | 2 | 3 |
| Endometrial | | 3 | 5 | 2 | 9/10(positive) | 1 | 4 | 4 | | NR | 6/10 (2 aboundent/ | 3 | 4 | 2 | |
| | | | | | | | | | | | 4 rare) | | | | |
| NSCLC | | 1 | 6 | 3 | 9/10(positive) | | 3 | 5 | 1 | NR | 7/9 (2 aboundent/ | 2 | 5 | 2 | |
| | | | | | | | | | | | 5 rare) | | | | |
| Ovary | | 1 | 5 | 4 | 6/9 (positive) | | 2 | 3 | 1 | 3/10 | 4/6 (4 aboundent) | 2 | | 4 | |
| Carcinoma | | | | | | | | | | | | | | | |
| CRC | | 5 | | 2 | 7/7 (positive) | | 4 | 2 | 1 | 5/7 | 6/7 (1 aboundent/ | 1 | 5 | 1 | |
| metastasis | | | | | | | | | | | 5 rare) | | | | |
| CRC | | 1 | 2 | | 3/3 (positive) | | 2 | | 1 | 0/3 | 2/3 (1 aboundent/ | 1 | 1 | 1 | |
| | | | | | | | | | | | 1 rare) | | | | |
| TNBC | | 1 | 1 | 3 | 5/5 (positive) | | 1 | 4 | | 5/5 | 4/5 (2 aboundent/ | 1 | 2 | 2 | |
| | | | | | | | | | | | 2 rare) | | | | |
| Breast | | | 2 | 3 | 5/5 (positive) | | 1 | 1 | 3 | 4/5 | 3/5 (2 aboundent/ | 2 | 1 | 1 | 1 |
| metastasis | | | | | | | | | | | 1 rare) | | | | |

### PVRL2 Diagnostic Assessment IHC Scores

[1431] Absence of any discernible PVRL2 staining IHC 0; or presence of discernible PVRL2 staining of any intensity in tumor-infiltrating immune cells identified or associated with intratumoral, and/or contiguous peri-tumoral desmoplastic stroma and/or discernible staining in tumor immune aggregates and/or tertiary lymphoid structures, and/or discernible staining on endothelial cells

### Scoring PVRL2 Expression by IHC

[1432] The presence or absence of PVRL2 expression in tumor specimens was evaluated using anti-PVRL2-specific antibody (CAT #95333, Cell Signaling Technology) that can detect PVRL2 in human formalin-fixed, paraffin-embedded (FFPE) tissues by IHC. To measure and quantify relative expression of PVRL2 in tumor samples, a PVRL2 IHC scoring system was used (0—no signal, 1—low, 2—medium, 3—high) to measure PVRL2 specific signal in tumor cells and tumor infiltrating immune cells, immune aggregates, TLSs and endothelial cells (Table 5 herein). Immune cells are defined as cells with lymphoid and/or macrophage/histiocyte morphology.

[1433] There was a wide dynamic range of PVRL2 staining intensities in tumor tissues. The signal was also classified as strong, moderate, weak, or negative staining. PVRL2 positive samples demonstrate primarily membranous staining in tumor cells and/or infiltrating immune cells, immune aggregates, TLSs and endothelial cells. PVRL2 staining was observed with variable intensity from weak with fine, light-brown membranes to strong with dark-brown thick membranes easily recognized at low magnification. As illustrated in FIG. 8, representative PVRL2 positive tumor samples is shown: Ovary cancer, in which most tumor cells are strongly positive for PVRL2, as well as immune infiltrating cells and immune aggregates TLSs and endothelial cells showing a membranous staining (100× magnification).

[1434] The staining in positive cases tends to be focal with respect to spatial distribution and intensity. The percentages of tumor or immune cells showing staining of any intensity were visually estimated and used to determine PVRL2 status (Table 5). An isotype negative control was used to evaluate the presence of background in test samples.

[1435] In some cases, the PVRL2 positive status comprised the presence of discernible PVRL2 staining of any intensity in either tumor cells or tumor infiltrating immune cells in up to 50% of tumor area occupied by tumor cells, associated intratumoral, and contiguous peri-tumoral desmoplastic stroma. Thus, PVRL2 positive staining includes as high as 50% of tumor cells or tumor infiltrating immune cells showing staining of any intensity.

### Example 2: PVRIG as Biomarker for Companion Diagnostics: IHC

[1436] In the IHC results presented herein, there was a wide dynamic range of PVRIG staining intensities in tumor tissues tested ((endometrial carcinoma, NSCLC, ovarian carcinoma, primary and metastatic colon carcinoma and primary and metastatic breast carcinoma). The signal was also classified as strong, moderate, weak, or negative staining. PVRIG positive samples demonstrated primarily membranous staining in infiltrating immune cells, immune aggregates, and TLSs. PVRIG staining was observed with variable intensity from weak with fine, light-brown membranes to strong with dark-brown thick membranes easily recognized at low magnification. There was no correlation between tumor type or stage with intensity of PVRIG expression.

[1437] The presence or absence of PVRIG expression in tumor specimens was evaluated using anti-PVRIG-specific antibody that can detect PVRIG in human formalin-fixed, paraffin-embedded (FFPE) tissues by IHC. To measure and quantify relative expression of PVRIG in tumor samples, a PVRIG IHC scoring system was developed to measure PVRIG specific signal in tumor infiltrating immune cells. Immune cells were defined as cells with lymphoid and/or myeloid morphology. Infiltrating immune cell staining was defined as the percent of the total tumor area occupied by immune cells that show staining of any intensity. The total tumor area encompassed the malignant cells as well as tumor-associated stroma, including areas of immune infiltrates immediately adjacent to and contiguous with the main tumor mass. In addition, infiltrating immune cell staining was defined as the percent of all tumor infiltrating immune cells. Table 7, below.

TABLE 7

| PVRIG status | Staining criteria | Predicted response |
|---|---|---|
| negative | 0% membrane | No to minimal |
| Low positive | >5% immune | likely |
| | infiltrating cells at any | |
| | intensity membrane or | |
| | cytoplasmatic | |
| Low positive | Any positive immune | likely |
| | infiltrating cells in | |
| | TLS or lymphoid | |
| | aggregates at any | |
| | intensity membrane or | |
| | cytoplasmatic | |
| Strong positive | Combination of the | Very likely |
| | two criteria above | |

[1438] IHC Scoring Instructions:
[1439] Score viable tumor cells exhibiting complete circumferential or partial linear plasma membrane, and intensity (H-score)
[1440] The percent of tumor area occupied by any tumor-associated immune cells (Immune Cells Present, ICP) was used to determine IC+, which was the percent area of ICP exhibiting PVRL2/PVRIG positive immune cell staining
[1441] Number of TLS or/and immune aggregates (totalIA), totalIA+ percent of cells positive for PVRL2/PVRIG
[1442] Average expression intensity of endothelial cells in the tumor area

### Example 3: PVRL2 as Biomarker for Companion Diagnostics: IHC

[1443] In the IHC results presented herein, there was a wide dynamic range of PVRL2 staining intensities in tumor tissues tested (endometrial carcinoma, NSCLC, ovarian carcinoma, primary and metastatic colon carcinoma and primary and metastatic breast carcinoma). The signal was also classified as strong, moderate, weak, or negative staining. PVRL2 positive samples demonstrated primarily membranous staining in tumor cells and/or infiltrating immune cells, immune aggregates, TLSs and endothelial cells. PVRL2 staining was observed with variable intensity from weak with fine, light-brown membranes to strong with dark-brown thick membranes easily recognized at low magnification.

[1444] The presence or absence of PVRL2 expression in tumor specimens was evaluated using anti-PVRL2-specific antibody that can detect PVRL2 in human formalin-fixed, paraffin-embedded (FFPE) tissues by IHC. To measure and quantify relative expression of PVRL2 in tumor samples, a PVRL2 IHC scoring system was developed to measure PVRL2 specific signal in tumor cells, endothelial cells and tumor infiltrating immune cells. Immune cells are defined as cells with lymphoid and/or myeloid morphology.

[1445] Tumor cell staining is expressed as the percent of all tumor cells showing membranous staining of any intensity. Endothelial cell and Infiltrating immune cell staining is defined as the percent of the total tumor area occupied by endothelial and/or immune cells that show staining of any intensity. The total tumor area encompassed the malignant cells as well as tumor-associated stroma, including areas of immune infiltrates immediately adjacent to and contiguous with the main tumor mass. In addition, infiltrating immune cell staining is defined as the percent of all tumor infiltrating immune cells. Table 8, below.

TABLE 8

| PVRL2 status | Staining criteria | Predicted response |
|---|---|---|
| negative | 0% membrane | No to minimal |
| Tumor | >20% tumor membrane | likely |
| Positivity (TS) | staining at +1 IHC score | |
| Immune | >20% immune infiltrating | likely |
| Positivity (IS) | cells at any intensity | |
| | membrane or cytoplasmatic | |
| Endothelial | >20% endothelial cells at | likely |
| Positivity (ES) | any intensity membrane or | |
| | cytoplasmatic | |
| Total | Any combination of two | Very likely |
| Positive (ToP = | Positivity scores | |
| TS + IS + ES) | | |

[1446] IHC Scoring Instructions:
[1447] Score viable tumor cells exhibiting complete circumferential or partial linear plasma membrane, and intensity (H-score)
[1448] The percent of tumor area occupied by any tumor-associated immune cells (Immune Cells Present, ICP) is used to determine IC+, which is the percent area of ICP exhibiting PVRL2/PVRIG positive immune cell staining
[1449] Number of TLS or/and immune aggregates (totaIA), totalIA+ percent of cells positive for PVRL2/PVRIG
[1450] Average expression intensity of endothelial cells in the tumor area

### Example 4: Single Cell Analysis of PVRL2 and PVRIG Expression

### Example 4A: Analysis of PVRIG Expression in Immune Subsets

[1451] There is growing evidence of importance of TSCM cells in immunotherapy (Sade-Feldman M, et al., Cell. 2018 Nov. 1; 175(4):998-1013.e20. doi: 10.1016/j.cell.2018.10.038.).

### Methods of Evaluating PVRIG Expression on TSCM (Stem Cell-Like Memory T-Cells)

[1452] Supervised Clustering
[1453] Enriched Populations
[1454] Un-supervised clustering (not shown)
[1455] Selection of positive Cells in scRNA (e.g., TCF7+PD-1+)
   TSCM Cluster is Enriched for +−/Markers Associated with TSCM

[1456] FIG. 9. CD8+ TILS NSCLC scRNA (GSE99254) representative data (supervised approach)

### Inhibitory Receptor Expression in CD8+ Cells

[1457] FIG. 10. NSCLC scRNA (GSE99254) Representative Data (supervised approach).

### TSCM Cells are Preferentially Located in Lymph Nodes (Supervised Approach)

[1458] FIG. 11. Fraction of TSCM in CD8 cells in lymph node vs. tumor.

### Fraction of TSCM CD8+ Cells is Predictive of Response to PD-1

[1459] FIG. 12. CD8 cell types pre-treatment responder vs. non-responders.

### PVRIG Expression in Enriched Populations Supports TSCM Expression Profile (NGS)

[1460] FIG. 13. RNA Expression of DNAM-1 Axis in Stem-Like vs. Terminally differentiated CD8 Cells in Bladder Cancer Patients. The figure presents expression of PVRIG on Stem-like cells, which are important for (i) stem-like CD8 T cell acts as a precursor to generate a terminally differentiated effector population (ii) associated with improved prognosis upon checkpoint blockade (Data source: https://www.nature.com/articles/s41586-019-1836-5)

### PVRIG Expression in TSCM (Stem Cell-Like Memory T-Cells)

[1461] This example describes a PCA based method of clustering of CD8 cells into various cell states and analyzing PVRIG expression among these cell states.

[1462] Six major CD8+ T cell states were identified across various scRNA studies which included: Naive, TSCM, TRM, Effector, ExCell states were classified based on the expression of previously identified markers including: naïve (CXCR5, TCF7, IL7R, CCR7, SELL, CD28, SATB1), T effector (FGFBP2, CX3CR1, SORL1), Tissue resident memory (ITGAE, ZNF683, ITGA1), Exhausted (HAVCR2, ENTPD1, GZMB, LAYN, CD38, VCAM1), Cycling (Top2a, K167).

[1463] Naïve CD8 cells and TSCM both had high overlapping expression of markers associated with early differentiation state of CD8 cells. In order to generate a signature to allow for the separation of TSCM from naïve cells we compared the expression profile of CD8 cells with high expression of a naïve signature from peripheral blood in comparison to CD8 cells in tumor samples and CD8 cells with high expression of a naïve signature from antigen specific CD8+ PMEL cells compared to CD8+WT cells. We identified a series of recurring genes with expression in states of increases antigen exposure across different studies and associated these with antigen exposure and an early CD8 differentiation state characteristic of TSCM CD8+ cells. Gene used to separate CD8+ TSCM from Naïve CD8+ included: CCL4, CCL5, CD69, CST7, FOS, FOSB, JUN, PPP1R15A, RGS1, SLC2A3, SRGN, TNFAIP3, BTG2, DUSP1, DUSP2, IER2, JUNB, NR4A2, RGS2, CD44, GZMB, HLA-DRB1, ITGA1, IFNG, JUND, PTPN22, FASLG, GZMA, GZMK, and/or IL2RB (i.e., TSCM signature).

[1464] Naieve CD8+ signature include ACTN1, C1orf162, CCR7, IL7R, LDHB, LDLRAP1, LEF1, LINC00861, MAL, MYC, NELL2, NOSIP, PLAC8, RASGRP″, S1PR1, SELL, SERINC5, STK38, TCF7, TRABD2A, and/or LTB.

### PCA Based Method

[1465] Description of PCA based method can be found in Jolliffe. I. and Cadima J. (https://doi.org/10.1098/rsta.2015.0202).

[1466] Large datasets are increasingly common and are oftentimes difficult to process and interpret. Principal component analysis (PCA) is an approach for reducing the dimensionality of such datasets, enhancing interpretability while minimizing the possibility of loss of content of data. To this end the approach generates new uncorrelated variables that successively maximize variance. Identifying such new variables, the principal components, reduces to solve an eigenvalue/eigenvector problem, and the new variables are defined by the dataset at hand, not a priori, thereby making PCA a versatile data analysis tool.

[1467] FIG. 14. Expression profiles of PVRIG across data sets of various types of tumor.

[1468] Results of the PCA based analysis showed that PVRIG expression is expressed across different CD8 cell states (TEM, TRM, cycling, TSCM, naïve, Exhausted) observed in scRNA studies across tumor indications. In contrast to PD-1 and other immune checkpoints whose expression profile is upregulated upon exhaustion, PVRIG expression was observed to be more uniform across different CD8 states.

[1469] Table 9. List of datasets used for CD8 cell subpopulation analysis, and their source studies.

TABLE 9

| Studies | Tissue | Disease | GEO | Species | Treatment |
|---|---|---|---|---|---|
| Defining T cell | Skin | Melanoma | GSE120575 | human | aPD1 |
| states associated | | | | | aCTLA4 |
| with response to | | | | | |
| checkpoint | | | | | |
| immunotherapy in | | | | | |
| melanoma | | | | | |
| Single-cell Map of | Breast | Breast Cancer | GSE114725 | human | |
| Diverse Immune | | | | | |
| Phenotypes in the | | | | | |
| Breast Tumor | | | | | |
| Microenvironment | | | | | |
| 3′ RNA Sequencing | | | | | |
| Landscape and | Liver | Hepatocellular | GSE140228 | human | |
| Dynamics of Single | | carcinoma | | | |
| Immune Cells in | | | | | |
| Hepatocellular | | | | | |
| Carcinoma | | | | | |
| Single-cell | Lung | Lung Cancer | GSE111894 | human | |
| transcriptomic | | | | | |
| analysis of tissue | | | | | |
| resident memory T | | | | | |
| cells in human lung | | | | | |
| cancer | | | | | |
| Single-cell RNA- | Skin | Melanoma | GSE115978 | human | aPD1 |
| seq of melanoma | | | | | |
| ecosystems reveals | | | | | |
| sources of T cells | | | | | |
| exclusion linked to | | | | | |
| immunotherapy | | | | | |
| clinical outcomes | | | | | |
| Clonal replacement | Skin | Squamous cell | GSE123813_SCC | human | aPD1 |
| of tumor-specific T | | carcinoma | | | |
| cells following PD-1 | | tumor | | | |
| blockade | | | | | |
| Landscape of | Liver | Hepatocellular | GSE98638 | human | |
| infiltrating T cells | | carcinoma | | | |
| in liver cancer | | | | | |
| revealed by single- | | | | | |
| cell sequencing | | | | | |
| Lineage tracking | Colorectal | Colorectal | GSE108989 | human | |
| reveals dynamic | | cancer | | | |
| relationships of T | | | | | |
| cells in colorectal | | | | | |
| cancer | | | | | |
| T cell landscape of | Lung | Non Small | GSE99254 | human | |
| non-small cell lung | | Cell Lung | | | |
| cancer revealed by | | carcinoma | | | |
| deep single-cell | | | | | |
| RNA sequencing | | | | | |
| Single cell 3′ RNA | Colorectal | Colorectal | GSE144735 | human | |
| sequencing of 6 | | cancer | | | |
| Belgian colorectal | | | | | |
| cancer patients | | | | | |
| Peripheral clonal | Lung | Lung | GSE139555_LUNG_TUMOR | human | Pre |
| expansion of T | | Adenocarcinoma | | | treatment |
| lymphocytes associates | | and Large cell | | | |
| with tumour infiltration | | neuroendocrine | | | |
| and response to cancer | | carcinoma | | | |
| immunotherapy | | | | | |

### PVRIG as Biomarker, Based on Expression in Various CD8 Cells Subtypes

[1470] This example provides a method of determining the likelihood of response of a human subject having cancer to a PVRIG inhibitor, comprising determining the level of PVRIG expressing various CD8 cells subtypes in tumor, tumor microenvironment, and/or peripheral blood.

TABLE 10

| | CD8-% | | TSCM-% | | Naive-% | | Exhausted-% |
|---|---|---|---|---|---|---|---|
| | PVRIG | CD8- | PVRIG | TSCM- | PVRIG | Naive- | PVRIG |
| | expressing | number | expressing | number | expressing | number | expressing |
| % NonZero Expression in CD8 cells | cells | of cells | cells | of cells | cells | of cells | cells |
| GSE139555_Lung_TUMOR_SingleCellLungCancer | 44 | 15880 | 56 | 4154 | 35 | 1447 | 39 |
| GSE146771_SS2_TUMOR_SingleCellCRC | 68 | 1179 | 61 | 462 | 63 | 187 | 77 |
| GSE115978_SingleCellMelano | 54 | 1639 | 47 | 182 | 53 | 1260 | 59 |
| GSE120575_SingleCellMelanoma | 40 | 6461 | 36 | 2462 | 44 | 2897 | 40 |
| GSE123813_SCC_SingleCellSCC | 2 | 14604 | 2 | 5918 | 2 | 3299 | 3 |

| | | TRM-% | | Effector-% | |
|---|---|---|---|---|---|
| | Exhausted- | PVRIG | TRM- | PVRIG | Effector- |
| | number | expressing | number | expressing | number |
| % NonZero Expression in CD8 cells | of cells | cells | of cells | cells | of cells |
| GSE139555_Lung_TUMOR_SingleCellLungCancer | 8714 | 31 | 59 | 72 | 554 |
| GSE146771_SS2_TUMOR_SingleCellCRC | 392 | 8 | 5 | 6 | 53 |
| GSE115978_SingleCellMelano | 82 | NA | NA | 47 | 17 |
| GSE120575_SingleCellMelanoma | 1915 | 28 | 117 | 34 | 259 |
| GSE123813_SCC_SingleCellSCC | 1054 | 0 | 402 | 3 | 79 |

[1471] Based on Table 10 above, cancer patients, having at least 10% of CD8 cells in the tumor, tumor microenvironment, and/or peripheral blood expressing PVRIG, had a higher probability to respond to the anti-PVRIG treatment.

[1472] Cancer patients, having at least 10% of TSCM cells in the tumor, tumor microenvironment, and/or peripheral blood expressing PVRIG, had a higher probability to respond to the anti-PVRIG treatment.

[1473] Cancer patients, having at least 10% of Naïve CD8 cells in the tumor, tumor microenvironment, and/or peripheral blood expressing PVRIG, had a higher probability to respond to the anti-PVRIG treatment.

[1474] Cancer patients, having at least 10% of exhausted CD8 cells in the tumor, tumor microenvironment, and/or peripheral blood expressing PVRIG, had a higher probability to respond to the anti-PVRIG treatment.

[1475] Cancer patients, having at least 5% of TRM cells in the tumor, tumor microenvironment, and/or peripheral blood expressing PVRIG, had a higher probability to respond to the anti-PVRIG treatment.

[1476] Cancer patients, having at least 5% of Effector cells in the tumor, tumor microenvironment, and/or peripheral blood expressing PVRIG, had a higher probability to respond to the anti-PVRIG treatment.

TABLE 11

| CD8 cell type | Cycling | Exhausted | Naive | Effector | TRM | TSCM |
|---|---|---|---|---|---|---|
| GSE120575 | 3.81% | 37.37% | 1.81% | 4.01% | 7.29% | 23.30% |
| GSE114725 | 0.12% | 0.13% | 5.25% | 43.23% | 29.17% | 5.09% |
| GSE140228 | 2.29% | 6.18% | 12.37% | 19.25% | 22.79% | 33.15% |
| GSE111894 | 3.41% | 23.62% | 0.00% | 2.03% | 46.59% | 15.04% |
| GSE115978 | 4.39% | 76.88% | 0.00% | 1.04% | 5.00% | 11.10% |
| GSE123813_SCC | 0.95% | 22.59% | 2.75% | 0.54% | 7.22% | 40.52% |
| GSE98638 | 0.00% | 30.50% | 6.31% | 14.29% | 19.95% | 14.93% |
| GSE108989 | 5.20% | 15.72% | 4.05% | 5.26% | 46.19% | 22.25% |
| GSE99254 | 1.24% | 4.49% | 5.41% | 11.50% | 46.20% | 16.77% |
| GSE144735 | 1.24% | 4.52% | 5.44% | 11.57% | 46.47% | 16.87% |
| GSE139555_LUNG_TUMOR | 0.69% | 9.11% | 0.37% | 3.49% | 54.87% | 26.16% |

[1477] Based on Table 11, cancer patients that have the presence or presense at an increased level as compared to a control or a patient that does not have the presence of any of: TSCM, TRM, naïve, exhausted, cycling, and effector CD8 positive T cells, expressing PVRIG, in a biological sample obtained from a tumor, tumor microenvironment, and/or peripheral blood, have a higher probability to respond the anti-PVRIG treatment.

[1478] Cancer patients that have the presence of any of: TSCM, TRM, naïve, exhausted, cycling, and effector CD8 positive T cells, expressing PVRIG, at least 0.5%, at least 1%, at least 1.5%, at least 2%, at least 2.5%, at least 3%, at least 3.5%, at least 4%, at least 4.5%, at least 5%, at least 10%, at least 15%, at least 20%, at least 25%, at least 30%, at least 35%, at least 40%, at least 45%, at least 50%, at least 55%, at least 60%, at least 65%, at least 70%, at least 75%, at least 80%, or at least 85%, out of total CD8 cells in a biological sample obtained from a tumor, tumor microenvironment, and/or peripheral blood, have a higher probability to respond the anti-PVRIG treatment.

### Example 4B: Inhibitory Ligand Expression on Activated Dendritic Cells

[1479] ScRNA Studies Identify a Dendritic Cell (DC) Cluster with an Activated Phenotype

[1480] Different studies have classified clusters as mRegDC, LAMP3+DC, and activated DC. Common signature that have been published includes LAMP3, CD80, CD83, CCR7, CCL19, FSCN1, CD40, and PDL1. For example, Maier et al., Nature, 2020, reports that subsets of both DC1 and DC2 express the mRegDC signature. mRegDCs express the highest level of MHC II, IFNγ, and IL-12, and are the most efficient activators of CD8+ cells. mRegDC signature is enriched in the DLN. And antigen uptake is associated with mRegDC program induction. Another article, Zhang et al., Cell, 2019, reports that cDC1, cDC2, pDCs may all contain LAMP3+ DCs. LAMP3+ is a maturation maker of multiple DC subsets. LAMP3+ DCs exhibits the highest migration score and migrate to lymph nodes. LAMP3+ is induced upon stimulation of DCs with LPS and IFNγ and Poly I:C. LAMP3+ DCs have larger interaction networks compared to other DC subsets.

PVR/PVRL2/PD-L1 are Co-Expressed in ‘Activated’ Dendritic Cells in Multiple scRNA Datasets

[1481] FIG. 15. Expression of PVRL2, PD-L1, and PVR in various DC populations of HNSCC, LUAD, and BCC subjects.

### Validation of Expression Profile on “Mature” DCs

[1482] FIG. 16. PVR & PVRL2 are expressed by myeloid cells in lymph nodes.

### PVRL2 Expression in DCs

[1483] Data were analyzed using the Seurat package. Seurat is an R package designed for QC, analysis, and exploration of single-cell RNA-seq data. Seurat aims to enable users to identify and interpret sources of heterogeneity from single-cell transcriptomic measurements, and to integrate diverse types of single-cell data. Detailed description of Seurat can be found in Butler et al., Nature Biotechnology 2018, and Stuart, Butler, et al., Cell 2019.

[1484] Dendritic cell subpopulation were identified based on the expression of markers associated with DC subsets in various studies and which were recurrent across various studies. Four Dendritic Cell populations were commonly identified across scRNA studies which matched the profile of pDC, DC1, DC2 and activated DCs previously identified in various studies.

[1485] A conventional Dendritic Cell 1 (DC1) population was identified based on the expression of markers including: XCR1, Clec9a, CADM1, BATF3, IRF8, and/or CD141.

[1486] A conventional Dendritic Cell 2 (DC2) population was identified based on the expression of markers including: CD1c, FCER1A, Clec10a, CD11c, CD207, CD141, IRF4, and/or clec10a.

[1487] A conventional plasmacytoid Dendritic Cell (pDC) population was identified based on the expression of markers including: CD1c, FCER1A, IRF8, IRF4 LILRB4, and/or LILRA4.

[1488] An activated Dendritic Cell (activated Dendritic cell) population was identified based on the expression of markers including: BIRC3, CCR7, LAMP3, FSCN1, CD83, IDO1, and/or CCL22.

[1489] The Seurat based analysis of PVRL2 expression in dendritic cells subsets showed that PVRL2 expression is elevated in DCs with an activated phenotype when compared to DC1 and DC2 populations. Additionally, PVRL2 expression appears to be more pronounced on the DC2 subset of dendritic cells in comparison to DC1. PDL-1 and PVR expression is restricted to activated DC. See FIGS. 15 and 17.

[1490] Table 12. List of datasets used for Dendritic cell subpopulation analysis, and their source studies.

TABLE 12

| Studies | Tissue | Disease | GEO | Treatment |
|---|---|---|---|---|
| Clonal replacement of tumor- | Skin | BCC | GSE123814_a | PD-1 |
| specific T cells following PD-1 | | | | |
| blockade (basal cell carcinoma) | | | | |
| Immune Landscape of Viral- | Head & Neck | HNSCC | GSE139324 | |
| and Carcinogen-Driven Head | | | | |
| and Neck Cancer | | | | |
| Peripheral clonal expansion | Lung, Kidney, | LUAD, | GSE139555_L | PD-1 |
| of T lymphocytes associates | Colon | ccRCC, | GSE139555_R | |
| with tumour infiltration and | | CRC | GSE139555_C | |
| response to cancer | | | | |
| immunotherapy | | | | |
| Single-cell RNA sequencing | Lung | NSCLC | GSE131907 | |
| demonstrates the molecular | | | | |
| and cellular reprogramming of | | | | |
| metastatic lung adenocarcinoma | | | | |

### Single Cell Analysis Summary and Conclusions

[1491] PVRIG/TIGIT/PD-1 are expressed in CD8+T Stem Cell Memory Cells.

[1492] PVRL2, PVR & PD-L1 are all regulated in activated DC subset across multiple scRNA datasets (n=8).

[1493] PVRL2 is expressed on endothelial cells in TLS & in lymph nodes (IHC).

[1494] CHA.7.518.1.H4(S241P) blockade could potentially mediate an interaction between activated DCs & Memory CD8+ cells in the tumor bed, lymph node and endothelial cells.

[1495] Potential mechanism which could lead to increase T cell priming and infiltration into less ‘inflamed’ tumors.

[1496] As PVR, PDL1 & PVRL2 are induced upon activated DCs triple blockade of PVRIG/TIGIT/PD1 may be required for full antigen priming of CD8+ memory cells by activated DCs.

[1497] Expression of PVRIG and/or PVRL2 on specific immune cell subpopulations such as CD8 memory cells or activated DCs may be used to identify patients more likely to respond to PVRIG blockade.

### PVRL2 as Biomarker, Based on Dendritic Cells

[1498] Increased densities of populations of dendritic cells in tumor and tumor microenvironment have been associated with better clinical outcome. In experimental models, dendritic cells have been shown to contribute to the success of cancer immunotherapies, for example with the immune checkpoint blocker anti-PD-1 (Moynihan K_{D}, et al., 2016. Nat Med. 22 (12): 1402-1410; Garris C S, et al., 2018. Immunity. 49 (6): 1148-1161).

[1499] We present herein that PVRL2 expression in various subtypes of DCs can serve as biomarker associated with better clinical outcome of anti-PVRIG treatment of cancer.

[1500] Based on Table 13 below, cancer patients having dendritic cells in the tumor, tumor microenvironment, and/or peripheral blood, with at least 10% PVRL2 expression, had a higher probability to respond the anti-PVRIG treatment.

[1501] Cancer patients having activated dendritic cells in the tumor, tumor microenvironment, and/or peripheral blood, with at least 10% PVRL2 expression, had a higher probability to respond the anti-PVRIG treatment.

[1502] Cancer patients having DC1 in the tumor, tumor microenvironment, and/or peripheral blood, with at least 5% PVRL2 expression, had a higher probability to respond the anti-PVRIG treatment.

[1503] Cancer patients having DC2 in the tumor, tumor microenvironment, and/or peripheral blood, with at least 10% PVRL2 expression, had a higher probability to respond the anti-PVRIG treatment.

TABLE 13

| | % PVRL2 expressing cells | | | |
|---|---|---|---|---|
| Data set | Activated DC | DC1 | DC2 | All DC |
| GSE123814_a | 70 | 56.9 | 58.3 | 60.8 |
| GSE131907 | 61.2 | 15.5 | 35.2 | 37.5 |
| GSE139555_R | 20.7 | 9.2 | 24.0 | 18.8 |
| GSE139555_C | 19.1 | NA | 35.8 | 29.6 |
| GSE139324 | 62.6 | 24.4 | 38 | 39.7 |
| GSE139555_L | 75.7 | 23.9 | 45.4 | 43 |

[1504] Based on Table 14 below, cancer patients that have the presence or presense at an increased level as compared to a control or a patient that does not have the presence of any of: Activated DC cells, DC1, and DC2, expressing PVRL2, in a biological sample obtained from a tumor, tumor microenvironment, and/or peripheral blood, have a higher probability to respond the anti-PVRIG treatment.

[1505] Cancer patients that have the presence of any of: Activated DC cells, DC1, and DC2, expressing PVRL2, at least 0.1%, at least 0.2%, at least 0.3%, at least 0.4%, at least 0.5%, at least 0.6%, at least 0.7%, at least 0.8%, at least 0.9%, at least 1%, at least 1.5%, at least 2%, at least 2.5%, at least 3%, at least 3.5%, at least 4%, at least 4.5%, or at least 5%, at least 10%, at least 15%, at least 20%, at least 25%, or at least 30%, out of total myeloid cells in a biological sample obtained from a tumor, tumor microenvironment, and/or peripheral blood, have a higher probability to respond the anti-PVRIG treatment.

TABLE 14

| | % out of myeloid cells | | |
|---|---|---|---|
| Data set | Activated DC | DC1 | DC2 |
| GSE123814_a | 8.91 | 8.93 | 19.08 |
| GSE131907 | 1.00 | 0.66 | 3.90 |
| GSE139555_R | 0.12 | 0.79 | 1.44 |
| GSE139555_C | 14.96 | NA | 25.38 |
| GSE139324 | 1.18 | 0.98 | 7.15 |
| GSE139555_L | 1.60 | 4.86 | 16.78 |

### Example 5: Amplification

### Background

[1506] PD-1 ligands, PD-L1 and PD-L2, are key targets of chromosome 9p24.1 amplification (both genes are located in the same chromosomal locus), a recurrent genetic abnormality in the nodular-sclerosis type of Hodgkin's lymphoma, in which ˜60% of patients harbor this amplification (Green et al., 2010). The 9p24.1 amplification results in high PDL1 and PD-L2 expression which is attributed to the high response rate of Hodgkin's lymphoma response to anti-PD1 therapy (Ansell et al., 2015). 9p24.1 amplification is rarely found in solid tumors, 0.7% in a cohort of 118187 tumor samples, the amplification is seen across tumor types (Goodman et al., 2018). Among patients treated with either PD-1 or PDL1 blocking mAbs the response rate in patients with the amplification was 66% (Goodman et al., 2018). In addition, in a recent publication the authors concluded that PDL1 copy number alteration could be an important predictive marker for PD-L1 inhibitor efficacy in breast cancer (Bachelot et al., 2020).

### Analysis and Results

[1507] Similar to PD-1 ligands, the DNAM-1/TIGIT/PVRIG ligands PVR and PVRL2 reside in the same genomic locus (19q13.3). Using the TCGA cBioPortal (https://www.cbioportal.org/) and Omicsoft™ tools exploring PVRL2 and PVR genomic gain (3-4 copies) or amplification (>4 copies), we found that ˜1-2% of all TCGA samples have a gene amplification of PVRL2 and/or PVR. Uterine carcinosarcoma has the highest rate of amplification (>10%, FIG. 18—PVRL2 as example). When examining genomic gain there are ˜40% of TCGA samples positive for the gain. In order to validate that the amplification/gain is accompanied also by mRNA higher expression in FIG. 19 the correlation between PVRL2 expression to genomic status shows that there is a positive correlation between copy number and PVRL2 expression, gastric cancer as an example.

[1508] Similar correlation between PVRL2 copy number and PVRL2 expression by mRNA were found in cell lines (data not shown).

### Conclusions

[1509] As there is a positive correlation between PVRL2 expression level and the activity of (CHA.7.518.1.H4(S241P)) anti-PVRIG blocking mAb, we propose that tumors with amplification of PVRL2 genomic locus will be highly responsive to CHA.7.518.1.H4(S241P) treatment. The detection could be done using whole genome sequencing, exome sequencing, FISH, CNA probes or other molecular genetics methods.

### Example 6: PVRL2 as Biomarker for PVRIG AB Treatment Efficiency: Indicative Results

### High PVRL2 Expression Leads to Monotherapy Activity for Anti-PVRIG Antibody CHA.7.518.1.H4(S241P)

[1510] PVRL2 expression on Mel624 tumor cells and MEL624 cells stably transduced with a human PVRL2 (MEL624 PVRL2 OE) is depicted in FIG. 20B, demonstrating higher PVRL2 expression levels in MEL624 PVRL2 OE cells than in the parental MEL624 or in the isotype control.

[1511] FIG. 20A presents the results of CMV pp65 assay on MEL624 parental vs. MEL624 PVRL2 OE cells, treated with CHA.7.518.1.H4(S241P) (as opposed to the isotype control). The results demonstrate higher amount of human interferon gamma (IFNγ) in MEL624 PVRL2 OE cells vs. the parental MEL624 cells, corresponding to higher activity of CHA.7.518.1.H4(S241P) on cells having higher PVRL2 expression.

[1512] These data indicate CHA.7.518.1.H4(S241P) may have a monotherapy activity on tumors with high PVRL2 expression

### CMV Tumor Cell Line Assay

[1513] CMV pp65(495-503) reactive T cells were expanded by thawing CMV seropositive donors (Conversant) and 2×10⁶ cells/ml were resuspended in RPMI medium (Gibco) supplemented with 1% glutamax (Gibco), 1% non-essential amino acids (NEAA), penicillin/streptomycin (Gibco), 10% human AB serum (Corning), 1 pg/ml CMV pp65₍₄₉₅₋₅₀₃₎ (Anaspec), 2 ng/ml IL-2 (R&D), and 10 ng/ml IL-7 (R&D). PBMCs were cultured for eight days with IL-2 and IL-7 replenished at day three and day five. At day eight, cells were harvested, and re-plated in low dose IL-2 (100 U/ml) at 2 million/ml in complete RPMI media for two days. At day eleven, cells are phenotyped for CD8⁺ T cell purity and CMV pp65₍₄₉₅₋₅₀₃₎ reactivity. Cells were stained with 0.25 μL of anti-CD3 (clone: OKT3)-allophycocyanin seven (APC-Cy7; Biolegend), 0.25 μL of anti-CD8 (clone: H1T8a)-Alexa Fluor (AF) 488 (Biolegend), a combined cocktail of 0.125 μL of anti-CD14 (clone: HCD14)-peridinin chlorophyll protein (PerCP-Cy5.5), 0.5 μl of anti-CD19 (clone: HIBCD14) PerCP-Cy5.5, 0.5 μL of anti-CD56 (clone: HCD56)-PerCP-Cy5,5(Biolegend), 1.25 μL of anti-TIGIT (clone: MBSA43)-allophycocyanin (APC; e-Bioscience) or 1.25 μL of IgG4 (Compugen)-isotype control (APC: Biolegend), 1.25 μL of CHA.7.518.1.H4(S241P)-AF-647 (Compugen, or 1.25 μL of IgG4-AF647 isotype control (Compugen), and 0.5 μL of anti-PD-1 (clone: EH12.2H7)-Brilliant Violet 421 (BV421; Biolegend) or 1.25 μL of IgG1 (cone: MOPC21) BV421 (Biolegend). To assess the frequency of tetramer-reactive CD8⁺ T cells, unlabeled PBMCs were stained with 10 μL of iTAg Tetramer—HLA-A*02:01 CMV pp65₍₄₉₅₋₅₀₃₎ (NLVPMVATV)-phycoerythrin (MBL-BION) for 30 min at room temperature. Cells were washed with PBS/1% BSA/0.01% sodium azide buffer, data were acquired using a Fortessa flow cytometer (BD Biosciences), and analyzed using FlowJo (Treestar).

[1514] Human CMV-Specific CD8+ T cell Co-Culture Assay with Human PVR- and Human PVRL2 (CD112)-Expressing Melanoma Cell Lines: The effect of CHA.7.518.1.H4(S241P), an anti-human PVRIG antibody, on antigen-specific cytokine secretion was assessed by an in vitro co-culture assay with human CMV-specific CD8⁺ T cells. The target cell line used in the assay was the HLA-A2+ melanoma cell line, Mel624, or MEL624 PVRL2 OE, which stably expressed human PVRL2 through lentiviral transduction (System Biosciences). The cells were pulsed with the CMV pp65 peptide at 0.0033 μg/ml or 0.001 μg/ml at 37 degree. C. for 1 hour. Cells were then washed and plated at 50,000 cells/well. CHA.7.518.1.H4(S241P) antibody, or an isotype antibody control hIgG4, were added to the culture at 10 μg/ml. Human CMV-specific CD8⁺ T cells from three different donors were expanded. 50,000 human CD8+ T cells were added to each well. Co-cultures were incubated at 37 degree. C. for 24 hours. After the incubation, plates were centrifuged at 1200 rpm for 1 minute and the supernatant was collected. The amount of human interferon gamma (IFNγ) in the co-culture supernatant was measured by flow cytometry using a cytometric bead assay (BD).

### CHO-S OKT3 Assay

[1515] The effect of CHA.7.518.1.H4(S241P), a non-blocking control antibody, and anti-DNAM-1 on CD4+ T cells from a healthy donor activated by CHO-S OKT3 cells or CHO-S OKT3 hPVRL2 cells is shown in FIG. 21A. The anti-DNAM-1 antibody, which blocks the interaction of PVRL2 with DNAM-1, only decreased CD4+ T cell proliferation when T cells were co-cultured with the hPVRL2-expressing CHO-S OKT3 cells, serving as a positive control in the assay. The dashed line indicates the percentage of CFSElo CD4+ T cells after treatment with either the human IgG4 or the mouse IgG1 isotype antibodies. Each dot represents a technical replicate, average+standard deviation is shown, data are representative of at least 2 trials. FIG. 21B shows IFN-γ production by three different human CD8⁺ T cell donors (Donors 231, 232, and 234) when co-cultured with the CHO-S OKT3 hPVRL2 cells and the indicated antibody.

[1516] The effects of CHA.7.518.1.H4(S241P) are dependent on the presence of hPVRL2 on CHO hPVRL2 cells as no effect was observed in the absence of PVRL2, suggesting that PVRL2 expression levels are indicative of treatment efficiency of patients with CHA.7.518.1.H4(S241P), as shown in FIGS. 21A and 21B.

[1517] The CHO-S OKT3 assay was utilized to determine whether CHA.7.518.1.H4(S241P) could enhance CD4+ and CD8+ T cell proliferation, and cytokine secretion. The target cells used in the co-culture assay were the Chinese hamster ovary cell line, CHO-S (ATCC), either stably overexpressing the single chain variable fragment of the anti-human CD3 antibody Clone OKT3 (abbreviated as OKT3), or stably overexpressing both OKT3 and human PVRL2 (abbreviated as hPVRL2). CHO-S OKT3 parental cells were grown in serum-free CD-CHO medium (Gibco) supplemented with 40 mM glutamax (Gibco), penicillin/streptomycin (Gibco), and 6 μg/ml puromycin (Gibco). CHO-S OKT3 hPVRL2 cells were grown in the same CD-CHO medium as the parental cells, but also supplemented with 600 μg/ml hygromycin B (Gibco). Primary CD4+ or CD8+ T cells were isolated from healthy human donors using the RosetteSep™ human CD4+ T cell enrichment cocktail (Stemcell Technologies) or using the human CD8+ microbeads (Miltenyi Biotec), respectively, and frozen in liquid nitrogen. On the day of the coculture assay, CD4+ or CD8+ T cells were thawed, counted, and labeled with 1 μM CFSE (Life Technologies) for 10 minutes at 37° C. Following this incubation, T cells were washed and resuspended in complete medium containing RPMI (Gibco), supplemented with 10% heat inactivated FBS, glutamax, penicillin/streptomycin, non-essential amino acids (Gibco), sodium pyruvate (Gibco), and 50 μM β-mercaptoethanol (Gibco). To inhibit proliferation of the target cells, CHO-S OKT3 and CHO-S OKT3 hPVRL2 cells were harvested from culture, and treated with mitomycin C (Sigma-Aldrich) for 1 hour at 37° C. with periodic mixing. After the incubation, the target cells were thoroughly washed, counted, and resuspended in complete RPMI medium. The assay was set up with a 5:1 ratio of T cells (100,000) to target cells (20,000). The target cells, T cells, and 10 μg/ml of each antibody treatment were added together in a 96-well U-bottom plate (Costar), and incubated for either 3 days (CD8+ T cells), or 5 days (CD4+ T cells) at 37° C. The antibody treatments included CHA.7.518.1.H4(S241P) antibody, a non-blocking control antibody to PVRIG, mouse-anti-DNAM-1 IgG1 (Clone 11A8, Biolegend), a mouse anti-human TIGIT IgG1 (Clone MBSA43, BioLegend), mouse IgG1 isotype control (Clone MOPC21, BioLegend), and a human IgG4 isotype control. For antibody dose-titrations, 3-fold dilutions from 66 nM to 0.264 nM of the CHA.7.518.1.H4(S241P) antibody and the respective isotype control antibody were utilized. For dose response experiments, data were analyzed by non-linear regression and fit to either a “One site specific binding” or “One site—Total and nonspecific binding” model using GraphPad Prism. After the 3-day or 5-day incubation period, co-culture supernatants were analyzed for secreted cytokines, including IFNγ, with the cytometric bead array (CBA) human Th1/Th2/Th17 cytokine kit (BD Biosciences), or with the LEGENDplex™ Human Th cytokine kit (BioLegend). T cell proliferation was measured by staining CD4+ or CD8+ T cells with the LIVE/DEAD fixable aqua dead cell stain kit (ThermoFisher Scientific), anti-CD4 antibody (Clone RPA-T4, BioLegend), and anti-CD8 antibody (Clone HIT8a, BioLegend). Data was acquired using a FACS Canto II (BD Biosciences), and analyzed using FlowJo (Treestar) software to determine the percentage of live, CFSE low proliferating CD4+ or CD8+ T cells.

[1518] PVRL2 expression and anti-CD3 (OKT3 clone) on CHO-S cells stably transduced with anti-CD3 (OKT3) and a human PVRL2 (CHO-S OKT3 PVRL2 OE), is depicted in FIG. 22, demonstrating higher PVRL2 expression levels in CHO-S PVRL2 OE cells than in the parental CHO-S OKT3.

### Example 7: PVRIG Protein Expression in TSCM

[1519] PVRIG protein expression on several lymphoid populations was tested in fresh human tumor samples from different cancer types.

[1520] Fresh human tumor and normal adjacent tissue samples from colorectal and ovarian cancers were harvested into RPMI and RPMI+1% HEPES respectively. The samples were cut into small pieces and transferred to GentleMACS C Tubes (Miltenyi) and digested using the enzyme mix—Tumor Dissociation Kit from Miltenyi, (130-095-929) in the GentleMACS machine according to manufacturer's instructions. Cells were filtered through 70 uM filter, and red blood cells were eliminated using RBC lysis buffer (BD 555899). Single cells were stained with CD45-BUV395 (clone: HI30; BD bioscience), CD8-BV785 (clone: SK1; BioLegend), CD3-APC cy7 (clone: HIT3a; BioLegend), CHA.7.518.1.H4(S241P)-AF-647 (anti PVRIG antibody CHA.7.518.1.H4(S241P) (Compugen) labeled with fluorescent dyes AF647), or IgG4-AF647 isotype control (labeled with fluorescent dyes AF647), TIM3-PE cy7 (clone: F38-2E2; BioLegend)), CD28-BV650 (clone: CD28.2; BioLegend), CXCR5-BB515 (clone: RF8B2; BD bioscience), PD-1-BV421 (clone: EH12.2H7; BioLegend), TIGIT-percp e710 (clone: MBSA43; e-Bioscience), CD69-BV711 (clone: FN50; BioLegend). Antibodies to lineage markers (CD45, CD3 and CD8) were used at 3 μg/ml final concentration. Other antibodies were used at concentration of 5 μg/ml. 2×10⁶ cells were stained with Zombie aqua (ThemnoFisher) for live/dead cells. Afterward, cells were blocked with a cocktail of anti-CD32 (e-Bioscience), anti-CD16 (BioLegend) and anti-CD64 (BioLegend). Samples were washed with FACS buffer (1% BSA, 0.1% sodium azide, in PBS) and stained with antibodies for 30 min at 4° C. Finally, cells were washed and acquired on the BD Fortessa flow cytometer and further analyzed using the FlowJo software (TreeStar). Gating strategy for the populations:
[1521] CD8⁺ T cells: CD45⁺CD3⁺CD8⁺
[1522] CD4⁺ T cells: CD45⁺CD3⁺CD8⁻
[1523] Tscm: CD45⁺CD3⁺CD8⁺TIM3⁻CXCR5⁺
[1524] CD45⁺CD3⁺CD8⁺TIM3⁻PD1⁺CD28⁺

### Results

[1525] CD8⁺Tscm cells in human colorectal and ovarian cancer samples were defined using two gating approaches: TIM3⁻CXCR5⁺ and TIM3⁻PD1⁺CD28⁺. As seen in FIG. 24A, samples were grouped based on the tumor type. Each dot in a column represents a sample. In the colorectal tumor samples tested, the expression of PVRIG was higher in the Tscm T cells compared to total CD8⁺ or CD4⁺ T cells. In the ovarian tumor sample PVRIG levels were similar among the populations tested.

[1526] In addition, comparing PVRIG expression in matched tumor and normal adjacent tissue (NAT) samples revealed higher expression in the tumor tissue in 1 of 2 colorectal samples tested in all the populations.

[1527] Patients presenting with higher PVRIG expression in TSCM T cells, benefit from a more efficient response to anti PVRIG treatment.

[1528] There is a growing appreciation for the potential role of stem-like memory T cells in cancer biology, and while recent evidence suggests that these cells express TIGIT and PD-1, our work now shows that they also express PVRIG. Furthermore, our data show that PVRIG's ligand, PVRL2, is expressed at high levels in both dendritic cells and tertiary lymphoid structures, as well as in PD-L1low or less-inflamed tumors. The data in the examples provided in the present application suggest that CHA.7.518.1.H4(S241P), may enhance T cell proliferation, activation and infiltration through activity in these important cell populations, even into tumors where current checkpoint blockade has not proven successful.

[1529] The data in the present examples support the role PVRIG represents an untapped immune checkpoint, suggesting a more significant role withing the DNAM-1 pathway and that targeting this pathway have the potential to provide a new treatment option, as monotherapy or in combination with other immune checkpoints, for both inflamed and non-inflamed tumors. Furthermore, these data reinforce that the simultaneous triple blockade of PVRIG, TIGIT, and PD-1 has the potential to expand the reach of cancer immunotherapies to new patient populations and cancer indications currently unresponsive or refractory to existing treatments.

[1530] PVRIG is expressed on Stem-like memory T-cells (TSCM), the cells that give rise to differentiated cytotoxic effector T cells, mediating direct anti-tumor effects in the tumor microenvironment.

[1531] PVRL2 and PVR, the ligands for PVRIG and TIGIT, respectively, are expressed in both PD-L1low and PD-L1high tumor types.

[1532] PVRL2 has abundant expression across various dendritic cell (DC) types, which are associated with efficient T cell activation, and in Tertiary Lymphoid Structures, structures in the tumor bed where local T cell priming occurs.

[1533] Cumulatively, the data presented suggest that CHA.7.518.1.H4(S241P) blockade could potentially mediate an interaction between DCs & TSCM cells in the tumor bed and lymphoid organs. This potential mechanism could lead to increase T cell priming and infiltration into less inflamed tumors.

### Example 8: TIGIT-PDCD1 in CD8 T Cells

### PVRIG & TIGIT are not Redundant in CD8 T Cells

[1534] Single cell analysis reveald that PDCD1 and TIGIT have mRNA expression patterns similar to markers of exhausted CD8 T cells, whereas PVRIG is different and closer to markers of transitional-memory T cells (equals early memory T cells).

[1535] Four high quality datasets were used in the analysis (high number of genes (>2200) per CD8 T cells).

[1536] The analysis was focusing on CD8 T cells since they are the main cells that fight tumors.

[1537] PVRIG clusters with early differentiation/memory genes, unlike other ICPS that cluster with exhausted genes, in CD8+ T cells.

[1538] Separated cells from a certain SC (Single Cell) experiment by their gene expression profile. This can be done using the Principal Component Analysis (PCA)-based method (see, the Word Wide Web at builtin.com/data-science/step-step-explanation-principal-component-analysis).

[1539] This was used to label cells, by different cell types labels, in SC experiments. This was done in a nested manner. First, separated into the main cell types: “Immune”, “Stromal”, “Epithelial”. Then separated each subgroup into its main cell types, for example, for “Immune”, “TCell”, “BCell”, “Myeloid”, “NK”, “Plasma Cell”. Separated into more nested subgroups. In the analysis genes were separate based on the cells in which they were expressed. Many gene markers were reviewed and over 1000 variable genes examined. Each point in the plots shown in the Figures is a gene.

[1540] Genes that are markers for particular CD8 cell types are described below:
[1541] Naïve: TCF7, CCR7, TL7R, LEF1, SELL, LTB
[1542] Exhausted: TIM3, ENTPD1, LAYN, CD38, LAG3, VCAM1, TOX
[1543] Transitional Memory (early memory): GZMK, SH2D1A, EOMES, DTHD1, SLAMF7, FCRL3, CD28
[1544] Tissue resident Memory: XCL1, XCL2, ITGAE, ITGA1, ZNF683, CXCR6
[1545] Circulating memory: NR4A1, NR4A2, NR4A3, KLF2
[1546] Cytotoxic: FCGR3A, FGFBP2, CX3CR1, KLRG1, LILRB1
[1547] Cycling: TOP2A, MKI67

[1548] For this analysis, only CD8 cells were used to separate the genes. For the analysis, 4 different datasets that have many CD8 T cells were used. Specific markers were used to differentiate between various CD8 cell types.

TABLE 15

| | | |
|---|---|---|
| T cell landscape of NSCLCrevealed | NSCLC | GSE99254 |
| by deep ssRNA sequencing | | |
| Lineage tracking reveals dynamic | Colorectal | GSE108989 |
| relationships of T cells in colorectal | cancer | |
| cancer | | |
| Defining T Cell States Associated | Melanoma | GSE120575 |
| with Response to Checkpoint | | |
| Immunotherapy in Melanoma | | |
| Landscape of infiltrating T cells | | |
| in liver cancer revealed by single | Liver cancer | GSE98638 |
| cell sequencing | | |

### Unsupervised Correlation Analysis

[1549] The heatmaps was based on the average of Spearman correlation coefficients between genes across 13 datasets (see, FIG. 38).

[1550] Spearman correlations were calculated after generating automatic clusters (using Seurat R package) and calculating the average expression level per cluster for each gene.

[1551] As can be seen from the results below, PVRIG, GZMK, and EOMES form a transitional cluster that was lowly correlated with both exhausted and naive cluster, which are anti-correlated with each other. See, FIG. 39.

### Cosine Similarity

[1552] Cosine similarity was calculated between all gene pairs based on their expression levels in CD8 T cells of GSE99254. Cosine similarity was used since it better handles the zero-inflated single cell data compared to the classical Pearson correlation.

[1553] A heatmap was drawn using the pheatmap R package (see, the World Wide Web at cran.r-project.org/web/packages/pheatmap/pheatmap.pdf).

[1554] The results reveal that the five cell states (naïve, exhausted, early memory, tissue resident memory, and cytotoxic) of CD8 T cells are nicely separated. The only exception is CD28, which is clustered with markers of naïve CD8 T cells.

[1555] The results also reveal that PDCD1, TIGIT and CTLA4 are clustered with markers of exhausted CD8 T cells, whereas PVRIG is clustered with markers of Early Memory CD8 T cells.

### SUMMARY

[1556] The marker gene groups are pretty much separated and clustered (dots with the same color are often clustered together).

[1557] As expected, in most of the plots, we find PDCD1 clusters with the CD8 Exhausted gene markers.

[1558] In most of the plots TIGIT and PDCD1 are close one to the other and cluster with the CD8 Exhausted gene markers.

[1559] Interestingly, in many cases PVRIG clusters with the CD8 Transitional Memory genes markers, supporting the different mechanism of action of PVRIG as compared to TIGIT and PD1, as well as the potential of CD8 Transitional Memory cells levels expressing PVRIG, to serve as biomarkers for patient population determination for treatment with an anti-PVRIG antibody and predicting the efficacy of treatment with an anti-PVRIG treatment antibody.

### Example 9: DNAM-1 Axis Pathway

[1560] DNAM-1 axis plays an essential role in tumor immunology. PVRIG binds PVRL2 as a functional ligand (TIGIT binding to PVRL2 is of low affinity). DNAM-1 axis comprises two parallel dominant complementary inhibitory pathways: PVRIG and TIGIT/CD96. TIGIT and PVRIG deliver direct inhibitory signal into T and NK cells. TIGIT/PVRIG has higher affinity to PVR/PVRL2 than DNAM-1 (decoy effect).

[1561] PD-1 inhibition blocks DNAM-1 (CD226) dephosphorylation and inactivation. DNAM-1 KO or inhibition reverses a-PD-1 tumor growth inhibition.

[1562] Potential intersection between PVRIG/TIGIT and PD-1 Pathways support combination approach to overcome immunotherapy resistance. Different tumor types may respond to different combinations depending on dominance of the pathways. Synergistic T cell activation with PVRIG, PD-1 and TIGIT blockade was shown in Whelan, et al., Cancer Immunol Res., 7(2):257-268, 2019 (incorporated by reference herein).

[1563] Growing Evidence of T stem-like Cells Importance in immunooncology. Anti-PD-L1 expands a key population of PD-1-positive TSCM which also express TIGIT. TIGIT and PD-1 co-blockade might enable optimal TSCM activation and DNAM-1 co-stimulation.

### SUMMARY

[1564] PVRIG is a novel checkpoint in the DNAM-1 axis, co-expressed with PD-1 and TIGIT in T_{SCM} and exhausted T cells but had a differentiated dominant expression on early differentiated cells (T_{SCM}-like).

[1565] PVRIG blockade showed synergistic activity with TIGIT and PD-1 blockade in pre-clinical studies.

[1566] PVRL2 and PVR were expressed in PD-L1^{low} and PD-L1^{high} tumor types. PVR and PVRL2 were expressed in inflamed and non-inflamed tumors. PVR/PVRL2 on tumor cells induced by: Genotoxic stress (DNA damage, oxidative stress). Tumorigenesis (loss of contact inhibition/increased invasiveness). PVRIG+TIGIT blockade may address PD-L1_{low} non-inflamed indications. PVR/PVRL2 on tumor cells was not modulated by IFN-γ, as provided in Whelan, et al., Cancer Immunol Res. 2019 (incorporated by reference herein) and PVR/PVRL2 was commonly expressed in PD-L1 negative tumors (see, SITC, November 2017, Whelan, et al., poster presentation).

[1567] PVRL2 had abundant expression across DC types and in TLS.

[1568] CHA.7.518.1.H4(S241P) blockade could potentially mediate an interaction between DCs and T_{SCM} in the tumor bed (TLS) and lymphoid organs, a mechanism which could lead to increased T cell priming and infiltration into less ‘inflamed’ tumors.

[1569] Preliminary indication for CHA.7.518.1.H4(S241P) antitumor activity in patients with PVRL2+PD-L1^{low} tumors.

[1570] Early clinical data showed increased peripheral immune cell proliferation and serum IFNγ, suggesting immune activation by CHA.7.518.1.H4(S241P) single agent.

### Example 10: Novel DNAM-1 Axis Member, PVRIG, is Potentially a Dominant Checkpoint Involved in Stem-Like Memory T Cells-Dendritic Cell Interaction

### Background

[1571] T cell accumulation in tumors is a prerequisite for response to cancer immunotherapy. Recent studies highlighted the importance of an early-memory (stem-like) T cell sub-population, that can self-renew and differentiate into effector cells, and of DCs, which are essential for T-cell expansion following checkpoint blockade. PVRIG is a novel inhibitory receptor that competes with the co-activating receptor DNAM-1, for the binding of a shared ligand, PVRL2.

[1572] T-cell infiltration and persistence in tumors is a prerequisite for response to cancer immunotherapy. Recent studies highlighted the importance of an early-memory (stem-like) T-cell sub-population, that can self-renew and differentiate into effector cells, and of dendritic cells (DCs), which are essential for T-cell priming and expansion following checkpoint blockade [1, 2]. PVRIG is a novel inhibitory receptor that competes with the co-activating receptor DNAM-1, for the binding of a shared ligand, PVRL2. PVRIG expression is induced on T and NK tumor infiltrating cells, whereas PVRL2 is expressed on tumor, endothelial and myeloid cells in the tumor micro-environment (TME) [3]. We investigated the expression of PVRIG and PVRL2 across TME immune subpopulations.

### Methods

[1573] Publicly available TME scRNA sequencing datasets were analyzed for the expression of PVRIG and PVRL2 across immune subsets. Unsupervised principal component analysis with genes used as entries, and hierarchical co-expression pattern among genes known to be expressed on naïve, memory, and exhausted CD8+ T-cells was performed. Observations were validated by evaluating PVRIG and PVRL2 expression by flow-cytometry and immunohistochemistry across a variety of tumor indications.

### Results

[1574] Across scRNA datasets, PVRIG, like TIGIT and PD-1, was expressed by both stem-like (TCF1+PD1+) and exhausted (TIM3+CD39+) CD8+ T-cells. High resolution unsupervised scRNA gene co-expression analysis revealed that while TIGIT is strongly correlated with PD-1, CTLA-4, and other markers of exhausted T-cells, PVRIG uniquely clusters with markers of early memory T-cells (FIG. 49A-49B). Accordingly, PVRIG protein expression was increased on CD28+ early-memory T-cells across indications (FIG. 50).

[1575] RNA expression data also revealed that PVRL2 is more abundantly expressed across DC-subtypes compared to PD-L1 and PVR (ligand of TIGIT, FIG. 51). Flow cytometry confirmed dominant PVRL2 expression on DC subtypes across tumor indications. Immunohistochemistry analysis identified PVRL2 expression in Tertiary Lymphoid Structures (FIG. 52).

### CONCLUSIONS

[1576] PVRIG is expressed on stem-like and exhausted T cells but has a unique dominant expression on early memory cells. PVRIG is also co-expressed with PD-1 and TIGIT on stem-like and exhausted T cells but has a unique dominant expression on early memory cells. PVRL2 is abundantly expressed across DC-types. PVRIG blockade could therefore enhance memory T-cells activation by DCs, resulting in their increased expansion and differentiation.

### REFERENCES

[1577] 1. Jansen, C. S., Prokhnevska, N., Master, V. A. et al. An intra-tumoral niche maintains and differentiates stem-like CD8 T cells. Nature 2019; 576; 465-470.
[1578] 2. Held W, et al. Intratumoral CD8+ T cells with stem cell-like properties: implications for cancer immunotherapy. Sci Transl Med. 2019; 11(515):eaay6863
[1579] 3. Whelan S, Ophir E, Kotturi M F, Levy O, Ganguly S, Leung L, et al. PVRIG and PVRL2 are induced in cancer and inhibit CD8+ T-cell function. Cancer Immunol Res. 2019; 7:257-68.

### Example 11: PVRL2 Expression on Various Cell Types

[1580] PVRL2 expression can be determined, for example, using immunohistochemistry (IHC), Immunofluorescence, RNAscope, single cell RNA (scRNA), etc. FIG. 14 shows the results of using scRNA in mapping the gene expression of PVRL2 in different types of cells in patients with tumors, healthy patients, or patients with inflamed tissues. As shown in FIG. 59, PVRL2 is overexpressed by endothelial cells and enterocytes in healthy patients and patients with an inflamed gastrointestinal (GI) tract.

[1581] The data presented in FIGS. 58-59 were analyzed using the Seurat package. Seurat is an R package designed for QC, analysis, and exploration of single-cell RNA-seq data. Seurat aims to enable users to identify and interpret sources of heterogeneity from single-cell transcriptomic measurements, and to integrate diverse types of single-cell data. (A detailed description of Seurat can be found in Butler et al., Nature Biotechnology 2018, and Stuart, Butler, et al., Cell 2019.)

[1582] FIGS. 58-59 present normalized expression after Seurat pipeline: 1=1 standard deviation above mean.

### Example 12: Exploring the Immune-Tumor Microenvironment Using High Resolution Single-Cell Spatial Transcriptomics: Leveraging Single Cell Spatial Transcriptomics to Gain In-Depth Understanding of the Tumor Microenvironment

[1583] Combining computational expertise with cutting-edge single cell technology Compugen showed location of PVRIG at the sites of T cell priming in the tumor microenvironment.

[1584] Preliminary findings further support the rationale for blocking PVRIG to address immunotherapy resistance in inflamed and less inflamed tumors.

[1585] Approach provides additional armamentarium to discover novel targets and gain biological insights for development of novel immunotherapies.

[1586] The computational platform is the cornerstone of our drug discovery and development capabilities. The biology of the TME is complex, and an in-depth understanding is required to develop novel cancer immunotherapies. This example supports successfully employing high resolution single cell spatial mapping of immune cells to decipher this complexity. Utilizing computational immuno-oncology biology and cutting-edge technology provides an unprecedented view into the composition and spatial localization of individual cells in the TME. Initial findings further suggest the presence of the DNAM-1 pathway including PVRIG, is located at the sites of T cell priming, including the tertiary lymphoid structures. This supports previous findings and further supports the rationale to block PVRIG to address immunotherapy resistance in both inflamed and less inflamed tumors. The ability to study cancer at the spatially resolved single-cell level is expanding our understanding of the complex interactions in the TME and opens the door to new therapeutic approaches.

[1587] The analytics approach integrates proprietary omics data, such as proteomics and spatial single-cell transcriptomics with public domain genomics and clinical metadata towards a machine learning based discovery of novel JO-specific targets, biomarkers and mechanism of action.

[1588] The computational-driven hypotheses are then rapidly tested and validated by an internal wet-lab experimental group. The validated information is then integrated back into the discovery cycle, providing an additional layer of proprietary data which is being utilized to further optimize the computational predictive models. This tight integration of computational prediction with experimental validation has proved to be essential in its IO discoveries, clinical-stage programs, and pipeline progression.

### Background

[1589] Cancer immunotherapies manipulate the immune system to repropagate anti-tumor response. Development of such treatments relies on the understanding of the interactions between tumor, stroma and immune cells found in the tumor microenvironment (TME), which are often based on direct cell-cell interactions and local secretion of factors. Therefore, high resolution spatial mapping of immune cells and adjacent cells is highly valuable resource for deciphering nature of interactions in the TME for the development of novel anti-cancer treatments. Here we harness advancements in MERFISH technology to detect the expression of 350 distinct mRNA transcripts at sub-cellular resolution directly on Ovarian & Colorectal tumor tissue sections.

### Methods:

[1590] MERFISH assay was conducted on FFPE or frozen sections using the Vizgen Inc protocol and images were captured using 60× microscope. Images were decoded to RNA spots with xyz and gene id using Vizgen's Merlin software. Single-cell analysis was conducted using Scanpy after filtering cells based on size and quality. Probe and spatial single-cell visualizations were done using custom code, MERSCOPE-viewer or Scanpy. Cellular neighborhood and gene-gene correlation was calculated using custom code. Ligand-receptor analysis was conducted using Squidpy.

### Conclusion

[1591] High-resolution Spatial Transcriptomics allows in-depth profiling of the TME at the single-cell level. We have used this method to reaffirm aspects of known biology of the TME, such as association of CXCL10+ Activated DCs and CXCR3+ T-cells. We also demonstrated the presence of DNAM-1 pathway members in TLS regions. The presented methods could be used to uncover new biological findings that would enhance the understanding of the TME and possibly support the development of new cancer immunotherapy treatments.

[1592] The examples set forth above are provided to give those of ordinary skill in the art a complete disclosure and description of how to make and use the embodiments of the compositions, systems and methods of the invention, and are not intended to limit the scope of what the inventors regard as their invention. Modifications of the above-described modes for carrying out the invention that are obvious to persons of skill in the art are intended to be within the scope of the following claims. All patents and publications mentioned in the specification are indicative of the levels of skill of those skilled in the art to which the invention pertains.

[1593] All headings and section designations are used for clarity and reference purposes only and are not to be considered limiting in any way. For example, those of skill in the art will appreciate the usefulness of combining various aspects from different headings and sections as appropriate according to the spirit and scope of the invention described herein.

[1594] All references cited herein are hereby incorporated by reference herein in their entireties and for all purposes to the same extent as if each individual publication or patent or patent application was specifically and individually indicated to be incorporated by reference in its entirety for all purposes.

[1595] Many modifications and variations of this application can be made without departing from its spirit and scope, as will be apparent to those skilled in the art. The specific embodiments and examples described herein are offered by way of example only, and the application is to be limited only by the terms of the appended claims, along with the full scope of equivalents to which the claims are entitled.

The application's sequence listing, which the Patent Office published only in electronic form, follows.

SEQUENCE LISTING (1316 sequences)

SEQ ID NO: 1 - protein, 326 aa, Homo sapiens
MRTEAQVPALQPPEPGLEGAMGHRTLVLPWVLLTLCVTAGTPEVWVQVRMEATELSSFTIRCGFLGSGSISLVTVSWGGPNGAGGTTLAVLHPERGIRQWAPARQARWETQSSISLILEGSGASSPCANTTFCCKFASFPEGSWEACGSLPPSSDPGLSAPPTPAPILRADLAGILGVSGVLLFGCVYLLHLLRRHKHRPAPRLQPSRTSPQAPRARAWAPSQASQAALHVPYATINTSCRPATLDTAHPHGGPSWWASLPTHAAHRPQGPAAWASTPIPARGSFVSVENGLYAQAGERPPHTGPGLTLFPDPRGPRAMEGPLGVR

SEQ ID NO: 2 - protein, 479 aa, Homo sapiens
MARAAALLPSRSPPTPLLWPLLLLLLLETGAQDVRVQVLPEVRGQLGGTVELPCHLLPPVPGLYISLVTWQRPDAPANHQNVAAFHPKMGPSFPSPKPGSERLSFVSAKQSTGQDTEAELQDATLALHGLTVEDEGNYTCEFATFPKGSVRGMTWLRVIAKPKNQAEAQKVTFSQDPTTVALCISKEGRPPARISWLSSLDWEAKETQVSGTLAGTVTVTSRFTLVPSGRADGVTVTCKVEHESFEEPALIPVTLSVRYPPEVSISGYDDNWYLGRTDATLSCDVRSNPEPTGYDWSTTSGTFPTSAVAQGSQLVIHAVDSLFNTTFVCTVTNAVGMGRAEQVIFVRETPRASPRDVGPLVWGAVGGTLLVLLLLAGGSLAFILLRVRRRRKSPGGAGGGASGDGGFYDPKAQVLGNGDPVFWTPVVPGPMEPDGKDEEEEEEEEKAEKGLMLPPPPALEDDMESQLDGSLISRRAVYV

SEQ ID NO: 3 - protein, 518 aa, Homo sapiens
MARAAALLPSRSPPTPLLWPLLLLLLLETGAQDVRVQVLPEVRGQLGGTVELPCHLLPPVPGLYISLVTWQRPDAPANHQNVAAFHPKMGPSFPSPKPGSERLSFVSAKQSTGQDTEAELQDATLALHGLTVEDEGNYTCEFATFPKGSVRGMTWLRVIAKPKNQAEAQKVTFSQDPTTVALCISKEGRPPARISWLSSLDWEAKETQVSGTLAGTVTVTSRFTLVPSGRADGVTVTCKVEHESFEEPALIPVTLSVRYPPEVSISGYDDNWYLGRTDATLSCDVRSNPEPTGYDWSTTSGTFPTSAVAQGSQLVIHAVDSLFNTTFVCTVTNAVGMGRAEQVIFVRETPNTAGAGATGGIIGGIIAAIIATAVAATGILICRQQRKEQTLQGAEEDEDLEGPPSYKPPTPKAKLEAQEMPSQLFTLGASEHSPLKTPYFDAGASCTEQEMPRYHELPTLEERSGPLHPGATSLGSPIPVPPGPPAVEDVSLDLEDEEGEEEEEYLDKINPIYDALSY

SEQ ID NO: 4 - protein, 120 aa, synthetic construct
  REGION 1..120: note = source = /note="Description of Artificial Sequence: Synthetic polypeptide"
QVQLVQSGAEVKKPGASVKVSCKASGYTFTDYNINWVRQAPGQGLEWMGYIYPYIGGSGYAQKFQGRVTMTRDTSTSTVYMELSSLRSEDTAVYYCAREDKTARNAMDYWGQGTLVTVSS

SEQ ID NO: 5 - protein, 8 aa, synthetic construct
  REGION 1..8: note = source = /note="Description of Artificial Sequence: Synthetic peptide"
GYTFTDYN

SEQ ID NO: 6 - protein, 8 aa, synthetic construct
  REGION 1..8: note = source = /note="Description of Artificial Sequence: Synthetic peptide"
IYPYIGGS

SEQ ID NO: 7 - protein, 13 aa, synthetic construct
  REGION 1..13: note = source = /note="Description of Artificial Sequence: Synthetic peptide"
AREDKTARNAMDY

SEQ ID NO: 8 - protein, 447 aa, synthetic construct
  REGION 1..447: note = source = /note="Description of Artificial Sequence: Synthetic polypeptide"
QVQLVQSGAEVKKPGASVKVSCKASGYTFTDYNINWVRQAPGQGLEWMGYIYPYIGGSGYAQKFQGRVTMTRDTSTSTVYMELSSLRSEDTAVYYCAREDKTARNAMDYWGQGTLVTVSSASTKGPSVFPLAPCSRSTSESTAALGCLVKDYFPEPVTVSWNSGALTSGVHTFPAVLQSSGLYSLSSVVTVPSSSLGTKTYTCNVDHKPSNTKVDKRVESKYGPPCPPCPAPEFLGGPSVFLFPPKPKDTLMISRTPEVTCVVVDVSQEDPEVQFNWYVDGVEVHNAKTKPREEQFNSTYRVVSVLTVLHQDWLNGKEYKCKVSNKGLPSSIEKTISKAKGQPREPQVYTLPPSQEEMTKNQVSLTCLVKGFYPSDIAVEWESNGQPENNYKTTPPVLDSDGSFFLYSRLTVDKSRWQEGNVFSCSVMHEALHNHYTQKSLSLSPGK

SEQ ID NO: 9 - protein, 107 aa, synthetic construct
  REGION 1..107: note = source = /note="Description of Artificial Sequence: Synthetic polypeptide"
DIQMTQSPSSLSASVGDRVTITCRVSENIYSNLAWYQQKPGKAPKLLIYEATNLAEGVPSRFSGSGSGTDFTLTISSLQPEDFATYYCQHFWGTPYTFGQGTKLEIK

SEQ ID NO: 10 - protein, 6 aa, synthetic construct
  REGION 1..6: note = source = /note="Description of Artificial Sequence: Synthetic peptide"
ENIYSN

SEQ ID NO: 11 - skipped

SEQ ID NO: 12 - protein, 9 aa, synthetic construct
  REGION 1..9: note = source = /note="Description of Artificial Sequence: Synthetic peptide"
QHFWGTPYT

SEQ ID NO: 13 - protein, 214 aa, synthetic construct
  REGION 1..214: note = source = /note="Description of Artificial Sequence: Synthetic polypeptide"
DIQMTQSPSSLSASVGDRVTITCRVSENIYSNLAWYQQKPGKAPKLLIYEATNLAEGVPSRFSGSGSGTDFTLTISSLQPEDFATYYCQHFWGTPYTFGQGTKLEIKRTVAAPSVFIFPPSDEQLKSGTASVVCLLNNFYPREAKVQWKVDNALQSGNSQESVTEQDSKDSTYSLSSTLTLSKADYEKHKVYACEVTHQGLSSPVTKSFNRGEC

SEQ ID NO: 14 - protein, 121 aa, synthetic construct
  REGION 1..121: note = source = /note="Description of Artificial Sequence: Synthetic polypeptide"
DVQLVESGGDLVQPGGSRKLSCTASGFTFSNFGMHWVRQAPEKGLEWVAYISSGSSTIYYADTVKGRFTISRDNPENTLFLQMTSLRSEDTAMYYCTRLDYYTNSYSMDHWGQGTSVTVSS

SEQ ID NO: 15 - protein, 8 aa, synthetic construct
  REGION 1..8: note = source = /note="Description of Artificial Sequence: Synthetic peptide"
GFTFSNFG

SEQ ID NO: 16 - protein, 8 aa, synthetic construct
  REGION 1..8: note = source = /note="Description of Artificial Sequence: Synthetic peptide"
ISSGSSTI

SEQ ID NO: 17 - protein, 14 aa, synthetic construct
  REGION 1..14: note = source = /note="Description of Artificial Sequence: Synthetic peptide"
TRLDYYTNSYSMDH

SEQ ID NO: 18 - protein, 106 aa, synthetic construct
  REGION 1..106: note = source = /note="Description of Artificial Sequence: Synthetic polypeptide"
QIVLTQSPALMSASPGEKVTLTCSASSSLPYIYWYQQKPGSSPKPWIYLTSNLASGVPARFSGSRSGTSYSLTISSVEAEDAATYYCQQWSSNPFTFGSGTKLEIK

SEQ ID NO: 19 - protein, 5 aa, synthetic construct
  REGION 1..5: note = source = /note="Description of Artificial Sequence: Synthetic peptide"
SSLPY

SEQ ID NO: 20 - skipped

SEQ ID NO: 21 - protein, 9 aa, synthetic construct
  REGION 1..9: note = source = /note="Description of Artificial Sequence: Synthetic peptide"
QQWSSNPFT

SEQ ID NO: 22 - protein, 117 aa, synthetic construct
  REGION 1..117: note = source = /note="Description of Artificial Sequence: Synthetic polypeptide"
QVQLQQSGAELAKPGASVKMSCKASGYTFTSNWMHWVKQRPGQGLEWIGYINPSNGYTECNQKFRDKATLSADKSSSTAYMQLNSLTSADSAVYYCALMISAWLPYWGQGTLVTVSA

SEQ ID NO: 23 - protein, 8 aa, synthetic construct
  REGION 1..8: note = source = /note="Description of Artificial Sequence: Synthetic peptide"
GYTFTSNW

SEQ ID NO: 24 - protein, 8 aa, synthetic construct
  REGION 1..8: note = source = /note="Description of Artificial Sequence: Synthetic peptide"
INPSNGYT

SEQ ID NO: 25 - protein, 10 aa, synthetic construct
  REGION 1..10: note = source = /note="Description of Artificial Sequence: Synthetic peptide"
ALMISAWLPY

SEQ ID NO: 26 - protein, 111 aa, synthetic construct
  REGION 1..111: note = source = /note="Description of Artificial Sequence: Synthetic polypeptide"
DIVLTQSPASLAISLGQRATISCRASQSVSASSYSYVHWYQQKPGQPPKLLIKYASSLESGVPARFSGSGSGTDFTLNIHPVEEEDTATYYCLHTWEIPYTFGGGTKLEIK

SEQ ID NO: 27 - protein, 10 aa, synthetic construct
  REGION 1..10: note = source = /note="Description of Artificial Sequence: Synthetic peptide"
QSVSASSYSY

SEQ ID NO: 28 - skipped

SEQ ID NO: 29 - protein, 9 aa, synthetic construct
  REGION 1..9: note = source = /note="Description of Artificial Sequence: Synthetic peptide"
LHTWEIPYT

SEQ ID NO: 30 - protein, 116 aa, synthetic construct
  REGION 1..116: note = source = /note="Description of Artificial Sequence: Synthetic polypeptide"
QVQLQQSGAELTRPGASVNLSCKASGYTFTSYWMQWVKQRPGQGLEWIGAIYPGDGDTRFNQKFKGKATLTADESSSTAYMQLSSLASEDSAVYYCATYYRYDDYWGQGTTLTVSS

SEQ ID NO: 31 - protein, 8 aa, synthetic construct
  REGION 1..8: note = source = /note="Description of Artificial Sequence: Synthetic peptide"
GYTFTSYW

SEQ ID NO: 32 - protein, 8 aa, synthetic construct
  REGION 1..8: note = source = /note="Description of Artificial Sequence: Synthetic peptide"
IYPGDGDT

SEQ ID NO: 33 - protein, 9 aa, synthetic construct
  REGION 1..9: note = source = /note="Description of Artificial Sequence: Synthetic peptide"
ATYYRYDDY

SEQ ID NO: 34 - protein, 106 aa, synthetic construct
  REGION 1..106: note = source = /note="Description of Artificial Sequence: Synthetic polypeptide"
QIVLTQSPAIMSASPGEKVTMTCSASSSVSYMHWYQQKSGTSPKRWIYDTSKLASGVPTRFSGSGSGTSYSLTISSMEAEDAATYYCQQWSSNPYTFGGGTKLEIK

SEQ ID NO: 35 - protein, 5 aa, synthetic construct
  REGION 1..5: note = source = /note="Description of Artificial Sequence: Synthetic peptide"
SSVSY

SEQ ID NO: 36 - skipped

SEQ ID NO: 37 - protein, 9 aa, synthetic construct
  REGION 1..9: note = source = /note="Description of Artificial Sequence: Synthetic peptide"
QQWSSNPYT

SEQ ID NO: 38 - protein, 122 aa, synthetic construct
  REGION 1..122: note = source = /note="Description of Artificial Sequence: Synthetic polypeptide"
EVQLQQSGPDLVKPGASMKISCKASGYTFIDYNIHWVKQSQGKSLDWIGYIYPYNGGTGYNQKFKNKATLTVDSSSSTAYMEVRSLTFEDSAVYFCAREADYYGNRGQFDYWGQGTLVTVSA

SEQ ID NO: 39 - protein, 8 aa, synthetic construct
  REGION 1..8: note = source = /note="Description of Artificial Sequence: Synthetic peptide"
GYTFIDYN

SEQ ID NO: 40 - protein, 8 aa, synthetic construct
  REGION 1..8: note = source = /note="Description of Artificial Sequence: Synthetic peptide"
IYPYNGGT

SEQ ID NO: 41 - protein, 15 aa, synthetic construct
  REGION 1..15: note = source = /note="Description of Artificial Sequence: Synthetic peptide"
AREADYYGNRGQFDY

SEQ ID NO: 42 - protein, 107 aa, synthetic construct
  REGION 1..107: note = source = /note="Description of Artificial Sequence: Synthetic polypeptide"
DIQMTQSPASLSVSVGETVTITCRASENIFSNLAWYQQKQGKSPQLLVYGEANLADGVPSRFSGSGSGTQYSLKINSLQSEDFGNYYCQHFWGTPYTFGGGTTLEIK

SEQ ID NO: 43 - protein, 6 aa, synthetic construct
  REGION 1..6: note = source = /note="Description of Artificial Sequence: Synthetic peptide"
ENIFSN

SEQ ID NO: 44 - skipped

SEQ ID NO: 45 - protein, 9 aa, synthetic construct
  REGION 1..9: note = source = /note="Description of Artificial Sequence: Synthetic peptide"
QHFWGTPYT

SEQ ID NO: 46 - protein, 120 aa, synthetic construct
  REGION 1..120: note = source = /note="Description of Artificial Sequence: Synthetic polypeptide"
QVTLKESGPGILQPSQTLSLTCSFSGFSLNTSGTGVGWIRQPSGKGLEWLTHIWWNDNKFYNTFLKSRLTISKETSNNQVFLKIASVDTADAATYYCARMAYGNLWFVNWGQGTLVAVST

SEQ ID NO: 47 - protein, 10 aa, synthetic construct
  REGION 1..10: note = source = /note="Description of Artificial Sequence: Synthetic peptide"
GFSLNTSGTG

SEQ ID NO: 48 - protein, 7 aa, synthetic construct
  REGION 1..7: note = source = /note="Description of Artificial Sequence: Synthetic peptide"
IWWNDNK

SEQ ID NO: 49 - protein, 12 aa, synthetic construct
  REGION 1..12: note = source = /note="Description of Artificial Sequence: Synthetic peptide"
ARMAYGNLWFVN

SEQ ID NO: 50 - protein, 111 aa, synthetic construct
  REGION 1..111: note = source = /note="Description of Artificial Sequence: Synthetic polypeptide"
DIVLTQSPASLAVSLGQRASISCRASRSVTISGYSYMYWYQQKPGQPPRLLFYLASNLASGVPARFSGSGSGTDFTLNIHPVEEEDAAIYYCQHSRELPYTFGGGTKLEIK

SEQ ID NO: 51 - protein, 10 aa, synthetic construct
  REGION 1..10: note = source = /note="Description of Artificial Sequence: Synthetic peptide"
RSVTISGYSY

SEQ ID NO: 52 - skipped

SEQ ID NO: 53 - protein, 9 aa, synthetic construct
  REGION 1..9: note = source = /note="Description of Artificial Sequence: Synthetic peptide"
QHSRELPYT

SEQ ID NO: 54 - protein, 123 aa, synthetic construct
  REGION 1..123: note = source = /note="Description of Artificial Sequence: Synthetic polypeptide"
QIQLVQSGPELKKPRETVKISCKASGYTFTDYSMHWVKQAPGKGLKWMGWINTETGEPTYADDFKGRFAFSLEASASSAYLQINILKDEDTATYFCARSRGGYYEDYYALDYWGQGTSVTVSS

SEQ ID NO: 55 - protein, 8 aa, synthetic construct
  REGION 1..8: note = source = /note="Description of Artificial Sequence: Synthetic peptide"
GYTFTDYS

SEQ ID NO: 56 - protein, 8 aa, synthetic construct
  REGION 1..8: note = source = /note="Description of Artificial Sequence: Synthetic peptide"
INTETGEP

SEQ ID NO: 57 - protein, 16 aa, synthetic construct
  REGION 1..16: note = source = /note="Description of Artificial Sequence: Synthetic peptide"
ARSRGGYYEDYYALDY

SEQ ID NO: 58 - protein, 107 aa, synthetic construct
  REGION 1..107: note = source = /note="Description of Artificial Sequence: Synthetic polypeptide"
DIQMTQSPASLSASVGESVTITCRASGNIHYYLAWYQQKQGKSPQLLVYNAKNLADGVPSRFSGSGSGTQFSLKINSLQPEDFGSYYCQHFWISPPTFGGGTKLEIK

SEQ ID NO: 59 - protein, 6 aa, synthetic construct
  REGION 1..6: note = source = /note="Description of Artificial Sequence: Synthetic peptide"
GNIHYY

SEQ ID NO: 60 - skipped

SEQ ID NO: 61 - protein, 9 aa, synthetic construct
  REGION 1..9: note = source = /note="Description of Artificial Sequence: Synthetic peptide"
QHFWISPPT

SEQ ID NO: 62 - protein, 118 aa, synthetic construct
  REGION 1..118: note = source = /note="Description of Artificial Sequence: Synthetic polypeptide"
EVQLRQSGADLVKPGASVKLSCTASGFNIKDTYIDWVKQRPEQGLDWIGRIDPANGNTKYDPKFQGKATIITDTSSNTAYLQLSNLTSEDTAVYYCARYGSYPYFDYWGRGTTLAVSS

SEQ ID NO: 63 - protein, 8 aa, synthetic construct
  REGION 1..8: note = source = /note="Description of Artificial Sequence: Synthetic peptide"
GFNIKDTY

SEQ ID NO: 64 - protein, 8 aa, synthetic construct
  REGION 1..8: note = source = /note="Description of Artificial Sequence: Synthetic peptide"
IDPANGNT

SEQ ID NO: 65 - protein, 11 aa, synthetic construct
  REGION 1..11: note = source = /note="Description of Artificial Sequence: Synthetic peptide"
ARYGSYPYFDY

SEQ ID NO: 66 - protein, 107 aa, synthetic construct
  REGION 1..107: note = source = /note="Description of Artificial Sequence: Synthetic polypeptide"
SIVMTQTPKFLLISAGDRVTITCKASQSVRNDVAWYQQKPGQSPKLLMYYASNRYTGVPDRFTGSGYGTDFTFTISTVQAEDLAVYFCQQDYSSPPTFGGGTKLEIK

SEQ ID NO: 67 - protein, 6 aa, synthetic construct
  REGION 1..6: note = source = /note="Description of Artificial Sequence: Synthetic peptide"
QSVRND

SEQ ID NO: 68 - skipped

SEQ ID NO: 69 - protein, 9 aa, synthetic construct
  REGION 1..9: note = source = /note="Description of Artificial Sequence: Synthetic peptide"
QQDYSSPPT

SEQ ID NO: 70 - protein, 118 aa, synthetic construct
  REGION 1..118: note = source = /note="Description of Artificial Sequence: Synthetic polypeptide"
QVQLQQSGPELVRPGVSVKISCKVSGYTFTDYVMHWVKQSHAKSLEWIGIISPYSGNTNYNQNFKGKATMTVDKSSSTAYMALARLTSEDSAIYYCAREGDLPMFAYWGQGTLVTVSA

SEQ ID NO: 71 - protein, 8 aa, synthetic construct
  REGION 1..8: note = source = /note="Description of Artificial Sequence: Synthetic peptide"
GYTFTDYV

SEQ ID NO: 72 - protein, 8 aa, synthetic construct
  REGION 1..8: note = source = /note="Description of Artificial Sequence: Synthetic peptide"
ISPYSGNT

SEQ ID NO: 73 - protein, 11 aa, synthetic construct
  REGION 1..11: note = source = /note="Description of Artificial Sequence: Synthetic peptide"
AREGDLPMFAY

SEQ ID NO: 74 - protein, 106 aa, synthetic construct
  REGION 1..106: note = source = /note="Description of Artificial Sequence: Synthetic polypeptide"
QIVLTQSPTIMSASPGEKVTMTCSASSSVSYIYWYQQNPGSSPRLLIYDTSILASGVPFRFSGSGSGTSYSLTISRMEAEDAATYYCQQWTSYPLTFGSGTKLELK

SEQ ID NO: 75 - protein, 5 aa, synthetic construct
  REGION 1..5: note = source = /note="Description of Artificial Sequence: Synthetic peptide"
SSVSY

SEQ ID NO: 76 - skipped

SEQ ID NO: 77 - protein, 9 aa, synthetic construct
  REGION 1..9: note = source = /note="Description of Artificial Sequence: Synthetic peptide"
QQWTSYPLT

SEQ ID NO: 78 - protein, 120 aa, synthetic construct
  REGION 1..120: note = source = /note="Description of Artificial Sequence: Synthetic polypeptide"
EVQLQQSGPELVKPGASVKISCKASGYTFTDYNINWVKQSHGKSLEWIGYIYPYIGGSGYNQKFKSKATLSADNPSSTAYMELRSLTSEDSAVYYCAREDKTARNAMDYWGQGTPVTVSS

SEQ ID NO: 79 - protein, 8 aa, synthetic construct
  REGION 1..8: note = source = /note="Description of Artificial Sequence: Synthetic peptide"
GYTFTDYN

SEQ ID NO: 80 - protein, 8 aa, synthetic construct
  REGION 1..8: note = source = /note="Description of Artificial Sequence: Synthetic peptide"
IYPYIGGS

SEQ ID NO: 81 - protein, 13 aa, synthetic construct
  REGION 1..13: note = source = /note="Description of Artificial Sequence: Synthetic peptide"
AREDKTARNAMDY

SEQ ID NO: 82 - protein, 107 aa, synthetic construct
  REGION 1..107: note = source = /note="Description of Artificial Sequence: Synthetic polypeptide"
DIQMTQSPASLSVSVGETVTIICRVSENIYSNLAWYQQKQGKSPQLLVYEATNLAEGVPSRFSGSGSGTQYSLKINSLQSEDFGSYYCQHFWGTPYTFGGGTKLEIK

SEQ ID NO: 83 - protein, 6 aa, synthetic construct
  REGION 1..6: note = source = /note="Description of Artificial Sequence: Synthetic peptide"
ENIYSN

SEQ ID NO: 84 - skipped

SEQ ID NO: 85 - protein, 9 aa, synthetic construct
  REGION 1..9: note = source = /note="Description of Artificial Sequence: Synthetic peptide"
QHFWGTPYT

SEQ ID NO: 86 - protein, 120 aa, synthetic construct
  REGION 1..120: note = source = /note="Description of Artificial Sequence: Synthetic polypeptide"
DVQLQESGPGLVKPSQSLSLTCTVTGYSITSDYAWNWIRQFPGNKLEWMGYISYSGSTSYNPSLKSRISITRDTSKNQFFLQLNSVTTEDTATYYCARHYRYPPYAMDYWGQGTSVTVSS

SEQ ID NO: 87 - protein, 9 aa, synthetic construct
  REGION 1..9: note = source = /note="Description of Artificial Sequence: Synthetic peptide"
GYSITSDYA

SEQ ID NO: 88 - protein, 7 aa, synthetic construct
  REGION 1..7: note = source = /note="Description of Artificial Sequence: Synthetic peptide"
ISYSGST

SEQ ID NO: 89 - protein, 13 aa, synthetic construct
  REGION 1..13: note = source = /note="Description of Artificial Sequence: Synthetic peptide"
ARHYRYPPYAMDY

SEQ ID NO: 90 - protein, 113 aa, synthetic construct
  REGION 1..113: note = source = /note="Description of Artificial Sequence: Synthetic polypeptide"
DIVMTQSPSSLAMSVGQKVTMSCKSSQSLLNSSNQKNYLAWYQQKPGQSPKLLVYFASTRESGVPDRFIGSGSGTDFTLTITSVQAEDLADYFCQQHYSTPFTFGSGTKLEIK

SEQ ID NO: 91 - protein, 12 aa, synthetic construct
  REGION 1..12: note = source = /note="Description of Artificial Sequence: Synthetic peptide"
QSLLNSSNQKNY

SEQ ID NO: 92 - skipped

SEQ ID NO: 93 - protein, 9 aa, synthetic construct
  REGION 1..9: note = source = /note="Description of Artificial Sequence: Synthetic peptide"
QQHYSTPFT

SEQ ID NO: 94 - protein, 118 aa, synthetic construct
  REGION 1..118: note = source = /note="Description of Artificial Sequence: Synthetic polypeptide"
QVQLKQSGPGLVQPSQSLSITCTVSGFSLTSFGVHWVRQSPGKGLEWLGVIWSGGTTVYDAAFISRLSISKDNSKSQVFFKMNSLQTNDTAIYYCARKRGNFYVMDYWGQGTSVTVSS

SEQ ID NO: 95 - protein, 8 aa, synthetic construct
  REGION 1..8: note = source = /note="Description of Artificial Sequence: Synthetic peptide"
GFSLTSFG

SEQ ID NO: 96 - protein, 7 aa, synthetic construct
  REGION 1..7: note = source = /note="Description of Artificial Sequence: Synthetic peptide"
IWSGGTT

SEQ ID NO: 97 - protein, 12 aa, synthetic construct
  REGION 1..12: note = source = /note="Description of Artificial Sequence: Synthetic peptide"
ARKRGNFYVMDY

SEQ ID NO: 98 - protein, 113 aa, synthetic construct; identical to SEQ ID NO: 90
  REGION 1..113: note = source = /note="Description of Artificial Sequence: Synthetic polypeptide"

SEQ ID NO: 99 - protein, 12 aa, synthetic construct
  REGION 1..12: note = source = /note="Description of Artificial Sequence: Synthetic peptide"
QSLLNSSNQKNY

SEQ ID NO: 100 - skipped

SEQ ID NO: 101 - protein, 9 aa, synthetic construct
  REGION 1..9: note = source = /note="Description of Artificial Sequence: Synthetic peptide"
QQHYSTPFT

SEQ ID NO: 102 - protein, 118 aa, synthetic construct
  REGION 1..118: note = source = /note="Description of Artificial Sequence: Synthetic polypeptide"
QVQLQQPGSELVRPGTSVKLSCKASGYTFTSYWVHWVRQRHGQGLEWIGNVYPGSGSTNYDEKFKSKGTLTVDTSSSTAYMHLSSLTSEDSAVYYCTRGVLRFPLDYWGQGTTLTVSS

SEQ ID NO: 103 - protein, 8 aa, synthetic construct
  REGION 1..8: note = source = /note="Description of Artificial Sequence: Synthetic peptide"
GYTFTSYW

SEQ ID NO: 104 - protein, 8 aa, synthetic construct
  REGION 1..8: note = source = /note="Description of Artificial Sequence: Synthetic peptide"
VYPGSGST

SEQ ID NO: 105 - protein, 11 aa, synthetic construct
  REGION 1..11: note = source = /note="Description of Artificial Sequence: Synthetic peptide"
TRGVLRFPLDY

SEQ ID NO: 106 - protein, 112 aa, synthetic construct
  REGION 1..112: note = source = /note="Description of Artificial Sequence: Synthetic polypeptide"
DIVMTQAAPSVPVTPGESVSISCRSSKSLLHSNGNTYLYWFLQRPGQSPHLLIYRMSNLASGVPDRFSGSGSGTAFTLRISRVEAEDVGVYYCMQHLEYPLTFGAGTKLELK

SEQ ID NO: 107 - protein, 11 aa, synthetic construct
  REGION 1..11: note = source = /note="Description of Artificial Sequence: Synthetic peptide"
KSLLHSNGNTY

SEQ ID NO: 108 - skipped

SEQ ID NO: 109 - protein, 9 aa, synthetic construct
  REGION 1..9: note = source = /note="Description of Artificial Sequence: Synthetic peptide"
MQHLEYPLT

SEQ ID NO: 110 - protein, 118 aa, synthetic construct
  REGION 1..118: note = source = /note="Description of Artificial Sequence: Synthetic polypeptide"
QVQLQQSGPEVVRPGVSVKISCKGSGYKFPDYVMHWVKQSHAKSLEWIGIISIYSGNTNYNQKFKGKATMTVDKSSSTAYMELARLTSEDSAIYYCAREGDLPMFAYWGQGTLVTVSA

SEQ ID NO: 111 - protein, 8 aa, synthetic construct
  REGION 1..8: note = source = /note="Description of Artificial Sequence: Synthetic peptide"
GYKFPDYV

SEQ ID NO: 112 - protein, 8 aa, synthetic construct
  REGION 1..8: note = source = /note="Description of Artificial Sequence: Synthetic peptide"
ISIYSGNT

SEQ ID NO: 113 - protein, 11 aa, synthetic construct
  REGION 1..11: note = source = /note="Description of Artificial Sequence: Synthetic peptide"
AREGDLPMFAY

SEQ ID NO: 114 - protein, 106 aa, synthetic construct
  REGION 1..106: note = source = /note="Description of Artificial Sequence: Synthetic polypeptide"
QIVLTQSPAIMSASPGEKVTMTCNASSSVSYMYWYQQKPISSPRLLIYDTSNLASGVPVRFSGSGSGTSYSLTIGRMEAEDAATYYCQQWSSYPLTFGAGTKVEVK

SEQ ID NO: 115 - protein, 5 aa, synthetic construct
  REGION 1..5: note = source = /note="Description of Artificial Sequence: Synthetic peptide"
SSVSY

SEQ ID NO: 116 - skipped

SEQ ID NO: 117 - protein, 9 aa, synthetic construct
  REGION 1..9: note = source = /note="Description of Artificial Sequence: Synthetic peptide"
QQWSSYPLT

SEQ ID NO: 118 - protein, 122 aa, synthetic construct
  REGION 1..122: note = source = /note="Description of Artificial Sequence: Synthetic polypeptide"
QVQLKESGPGLVAPSQSLSITCTVSGFSLTAYNINWVRQPPGKGLEWLGMIWGDGNTDYNSPLKSRLTISKDNSKSQVFLKMDSLQTDDTARYYCARDLKVRRDSPYTMDYWGQGTSVTVSS

SEQ ID NO: 119 - protein, 8 aa, synthetic construct
  REGION 1..8: note = source = /note="Description of Artificial Sequence: Synthetic peptide"
GFSLTAYN

SEQ ID NO: 120 - protein, 7 aa, synthetic construct
  REGION 1..7: note = source = /note="Description of Artificial Sequence: Synthetic peptide"
IWGDGNT

SEQ ID NO: 121 - protein, 16 aa, synthetic construct
  REGION 1..16: note = source = /note="Description of Artificial Sequence: Synthetic peptide"
ARDLKVRRDSPYTMDY

SEQ ID NO: 122 - protein, 112 aa, synthetic construct
  REGION 1..112: note = source = /note="Description of Artificial Sequence: Synthetic polypeptide"
NIMMTQSPSSLAVSAGEKVTMSCKSSQSVLYSSNQKNYLAWYQQKPGQSPKLLIYWASNRESGVPDRFTGSGSGTDFTLTISSVQAEDLAVYYCHQYLSSYTFGGGTKLEIK

SEQ ID NO: 123 - protein, 12 aa, synthetic construct
  REGION 1..12: note = source = /note="Description of Artificial Sequence: Synthetic peptide"
QSVLYSSNQKNY

SEQ ID NO: 124 - skipped

SEQ ID NO: 125 - protein, 8 aa, synthetic construct
  REGION 1..8: note = source = /note="Description of Artificial Sequence: Synthetic peptide"
HQYLSSYT

SEQ ID NO: 126 - protein, 124 aa, synthetic construct
  REGION 1..124: note = source = /note="Description of Artificial Sequence: Synthetic polypeptide"
DVQLQESGPGLVKPSQSLSLTCTVTGYSLTSDYAWNWIRQFPGNKLEWMGYITYSGGTTYNPSLKSRISITRDTSKNQFFLQLTSVTTEDTATYYCARRGSGTTVVGDWYFDVWGAGTTVTVSS

SEQ ID NO: 127 - protein, 9 aa, synthetic construct
  REGION 1..9: note = source = /note="Description of Artificial Sequence: Synthetic peptide"
GYSLTSDYA

SEQ ID NO: 128 - protein, 7 aa, synthetic construct
  REGION 1..7: note = source = /note="Description of Artificial Sequence: Synthetic peptide"
ITYSGGT

SEQ ID NO: 129 - protein, 17 aa, synthetic construct
  REGION 1..17: note = source = /note="Description of Artificial Sequence: Synthetic peptide"
ARRGSGTTVVGDWYFDV

SEQ ID NO: 130 - protein, 113 aa, synthetic construct
  REGION 1..113: note = source = /note="Description of Artificial Sequence: Synthetic polypeptide"
DIVMSQSPSSLAVSVGEKVTMSCKSSQSLLYSFNQKYYLAWYQQKPGQSPKLLIYWASTRESGVPDRFTGSGSGTDFTPTISSVTAEDLAVYYCQQFYTYPYTFGGGTKLEMK

SEQ ID NO: 131 - protein, 12 aa, synthetic construct
  REGION 1..12: note = source = /note="Description of Artificial Sequence: Synthetic peptide"
QSLLYSFNQKYY

SEQ ID NO: 132 - skipped

SEQ ID NO: 133 - protein, 9 aa, synthetic construct
  REGION 1..9: note = source = /note="Description of Artificial Sequence: Synthetic peptide"
QQFYTYPYT

SEQ ID NO: 134 - protein, 122 aa, synthetic construct
  REGION 1..122: note = source = /note="Description of Artificial Sequence: Synthetic polypeptide"
EVQVQQSGPELVKPGASVKISCKASGYTFTKSNMHWVKQSHGKSLEWIGYIYPYNGGTGYNQNFKSKATLTVDISSSTAYMELRSLTLEDSAVYLCAREADYYGNRGQFDYWGQGTLVTVSA

SEQ ID NO: 135 - protein, 8 aa, synthetic construct
  REGION 1..8: note = source = /note="Description of Artificial Sequence: Synthetic peptide"
GYTFTKSN

SEQ ID NO: 136 - protein, 8 aa, synthetic construct
  REGION 1..8: note = source = /note="Description of Artificial Sequence: Synthetic peptide"
IYPYNGGT

SEQ ID NO: 137 - protein, 15 aa, synthetic construct
  REGION 1..15: note = source = /note="Description of Artificial Sequence: Synthetic peptide"
AREADYYGNRGQFDY

SEQ ID NO: 138 - protein, 107 aa, synthetic construct
  REGION 1..107: note = source = /note="Description of Artificial Sequence: Synthetic polypeptide"
DIQMTQSPASLSVSVGETVTITCRASDNIFSNLAWYHQKQGKSPHLLVYGATNLADGVPSRFSGSGSGTQYSLKINSLQSEDFGDYYCQHFWGTPYTFGGGTKLEIK

SEQ ID NO: 139 - protein, 6 aa, synthetic construct
  REGION 1..6: note = source = /note="Description of Artificial Sequence: Synthetic peptide"
DNIFSN

SEQ ID NO: 140 - skipped

SEQ ID NO: 141 - protein, 9 aa, synthetic construct
  REGION 1..9: note = source = /note="Description of Artificial Sequence: Synthetic peptide"
QHFWGTPYT

SEQ ID NO: 142 - protein, 119 aa, synthetic construct
  REGION 1..119: note = source = /note="Description of Artificial Sequence: Synthetic polypeptide"
QVQLQQSGAELMRPGTSVKVSCKASGYAFTNHLIEWIKQRPGQGLEWIGVINPGSDSTDYNEKFKDKATLTADKSSSTAYMQLSSLTSDDSAVYFCARSLYYNSWFVYWGQGTLVTVSA

SEQ ID NO: 143 - protein, 8 aa, synthetic construct
  REGION 1..8: note = source = /note="Description of Artificial Sequence: Synthetic peptide"
GYAFTNHL

SEQ ID NO: 144 - protein, 8 aa, synthetic construct
  REGION 1..8: note = source = /note="Description of Artificial Sequence: Synthetic peptide"
INPGSDST

SEQ ID NO: 145 - protein, 12 aa, synthetic construct
  REGION 1..12: note = source = /note="Description of Artificial Sequence: Synthetic peptide"
ARSLYYNSWFVY

SEQ ID NO: 146 - protein, 107 aa, synthetic construct
  REGION 1..107: note = source = /note="Description of Artificial Sequence: Synthetic polypeptide"
DIQMTQSPASLSASVGETVTITCRASENIYSYLAWYQQKRGKSPQLLVYNAKTLVEGVPSRFSGSGSGTQFSLKINSLQPEDFGSYYCQHHYGTPYTFGGGTKLEIK

SEQ ID NO: 147 - protein, 6 aa, synthetic construct
  REGION 1..6: note = source = /note="Description of Artificial Sequence: Synthetic peptide"
ENIYSY

SEQ ID NO: 148 - skipped

SEQ ID NO: 149 - protein, 9 aa, synthetic construct
  REGION 1..9: note = source = /note="Description of Artificial Sequence: Synthetic peptide"
QHHYGTPYT

SEQ ID NO: 150 - protein, 118 aa, synthetic construct
  REGION 1..118: note = source = /note="Description of Artificial Sequence: Synthetic polypeptide"
EVQLQQSGAELVKPGASVRLSCTASGFSIRDTYIHWVKQRPEQGLDWIGKIDPANGKSEYDPKFQGRATMTTDTSSNTAYLQLSSLTSEDTAVYYCTRYGYYPYFDVWGAGTTVTVFS

SEQ ID NO: 151 - protein, 8 aa, synthetic construct
  REGION 1..8: note = source = /note="Description of Artificial Sequence: Synthetic peptide"
GFSIRDTY

SEQ ID NO: 152 - protein, 8 aa, synthetic construct
  REGION 1..8: note = source = /note="Description of Artificial Sequence: Synthetic peptide"
IDPANGKS

SEQ ID NO: 153 - protein, 11 aa, synthetic construct
  REGION 1..11: note = source = /note="Description of Artificial Sequence: Synthetic peptide"
TRYGYYPYFDV

SEQ ID NO: 154 - protein, 107 aa, synthetic construct
  REGION 1..107: note = source = /note="Description of Artificial Sequence: Synthetic polypeptide"
SIVMTQTPKFLLVSAGDRVAITCKASQSVRHDVVWYQQKPGQSPKLLIYYASSRYTGVPDRFTGSGYGTDFTFTISTVQAEDLALYFCLQDFSSPWTFGGGTKLEIK

SEQ ID NO: 155 - protein, 6 aa, synthetic construct
  REGION 1..6: note = source = /note="Description of Artificial Sequence: Synthetic peptide"
QSVRHD

SEQ ID NO: 156 - skipped

SEQ ID NO: 157 - protein, 9 aa, synthetic construct
  REGION 1..9: note = source = /note="Description of Artificial Sequence: Synthetic peptide"
LQDFSSPWT

SEQ ID NO: 158 - protein, 120 aa, synthetic construct
  REGION 1..120: note = source = /note="Description of Artificial Sequence: Synthetic polypeptide"
EVQLQQSGPELVKPGASVKISCKTSGYTFTKNTMHWVRQSHGKSLEWIGGINPNSGGASFNQKFMGKATLTVDKSSSTAYMELRSLTSEDSAVYYCARDGYDGDWFFDVWGAGTTVTVSS

SEQ ID NO: 159 - protein, 8 aa, synthetic construct
  REGION 1..8: note = source = /note="Description of Artificial Sequence: Synthetic peptide"
GYTFTKNT

SEQ ID NO: 160 - protein, 8 aa, synthetic construct
  REGION 1..8: note = source = /note="Description of Artificial Sequence: Synthetic peptide"
INPNSGGA

SEQ ID NO: 161 - protein, 13 aa, synthetic construct
  REGION 1..13: note = source = /note="Description of Artificial Sequence: Synthetic peptide"
ARDGYDGDWFFDV

SEQ ID NO: 162 - protein, 107 aa, synthetic construct
  REGION 1..107: note = source = /note="Description of Artificial Sequence: Synthetic polypeptide"
DIQMNQSPFSLSASLGDTVTITCHASQNIYVWLSWYQQKPGNIPKLLIYKASDLHTGVPSRFSGSGSGTDFTLNISSLQPEDIATYYCQQGQSYPRTFGGGTKLEIK

SEQ ID NO: 163 - protein, 6 aa, synthetic construct
  REGION 1..6: note = source = /note="Description of Artificial Sequence: Synthetic peptide"
QNIYVW

SEQ ID NO: 164 - skipped

SEQ ID NO: 165 - protein, 9 aa, synthetic construct
  REGION 1..9: note = source = /note="Description of Artificial Sequence: Synthetic peptide"
QQGQSYPRT

SEQ ID NO: 166 - protein, 114 aa, synthetic construct
  REGION 1..114: note = source = /note="Description of Artificial Sequence: Synthetic polypeptide"
QVQLKESGPGLVAPSQSLSITCTVSGFSLIGHGVNWIRQPPGKGLEWLGVIWGDGNTDYNSALKSRLSISKDNSKSQVFLKMNSLQTDDTARYFCAVNSAMDYWGQGTAVTVSS

SEQ ID NO: 167 - protein, 8 aa, synthetic construct
  REGION 1..8: note = source = /note="Description of Artificial Sequence: Synthetic peptide"
GFSLIGHG

SEQ ID NO: 168 - protein, 7 aa, synthetic construct
  REGION 1..7: note = source = /note="Description of Artificial Sequence: Synthetic peptide"
IWGDGNT

SEQ ID NO: 169 - protein, 8 aa, synthetic construct
  REGION 1..8: note = source = /note="Description of Artificial Sequence: Synthetic peptide"
AVNSAMDY

SEQ ID NO: 170 - protein, 107 aa, synthetic construct
  REGION 1..107: note = source = /note="Description of Artificial Sequence: Synthetic polypeptide"
NIVMTQSPKSMSMSVGERVTLNCTASENVASFVSWYQQKPEQSPKLLIYGTSNRYTGVPDRFTGSGSATDFTLTISSVQAEDLGDYHCGQSYNYPFTFGSGTKLEIE

SEQ ID NO: 171 - protein, 6 aa, synthetic construct
  REGION 1..6: note = source = /note="Description of Artificial Sequence: Synthetic peptide"
ENVASF

SEQ ID NO: 172 - skipped

SEQ ID NO: 173 - protein, 9 aa, synthetic construct
  REGION 1..9: note = source = /note="Description of Artificial Sequence: Synthetic peptide"
GQSYNYPFT

SEQ ID NO: 174 - protein, 119 aa, synthetic construct
  REGION 1..119: note = source = /note="Description of Artificial Sequence: Synthetic polypeptide"
QVQLQQSGAELVRPGASVKVSCKTSGYAFTNYLIEWVKQRPGQGLEWIGVINPGSGGIYYNDKFKVKTTLTADKSSSTAYMQLSSLTSDDSAVYFCARSETHDTWFAYWGQGTLVTVSA

SEQ ID NO: 175 - protein, 8 aa, synthetic construct
  REGION 1..8: note = source = /note="Description of Artificial Sequence: Synthetic peptide"
GYAFTNYL

SEQ ID NO: 176 - protein, 8 aa, synthetic construct
  REGION 1..8: note = source = /note="Description of Artificial Sequence: Synthetic peptide"
INPGSGGI

SEQ ID NO: 177 - protein, 12 aa, synthetic construct
  REGION 1..12: note = source = /note="Description of Artificial Sequence: Synthetic peptide"
ARSETHDTWFAY

SEQ ID NO: 178 - protein, 108 aa, synthetic construct
  REGION 1..108: note = source = /note="Description of Artificial Sequence: Synthetic polypeptide"
DIVMTQSQKFISTSVGDRVSITCKASQSVRIAVAWFQQKPGQSPKALIYLASTRHTGVPDRFTGSGSGTDFTLTISNVQSEDLADYFCLQHWNYPYTFGGGTKLEIKR

SEQ ID NO: 179 - protein, 6 aa, synthetic construct
  REGION 1..6: note = source = /note="Description of Artificial Sequence: Synthetic peptide"
QSVRIA

SEQ ID NO: 180 - skipped

SEQ ID NO: 181 - protein, 9 aa, synthetic construct
  REGION 1..9: note = source = /note="Description of Artificial Sequence: Synthetic peptide"
LQHWNYPYT

SEQ ID NO: 182 - protein, 120 aa, synthetic construct
  REGION 1..120: note = source = /note="Description of Artificial Sequence: Synthetic polypeptide"
QVQLQQSGAELVRPGTSVKMSCKAAGYTFTNYWIGWVKQRPGHGLEWIGDIYPGGGYTNYNEKFKGKATLTADTSSSTAYMQLSSLTSEDSAIYYCASPYYGSSYGFAFWGQGTLVTVSA

SEQ ID NO: 183 - protein, 8 aa, synthetic construct
  REGION 1..8: note = source = /note="Description of Artificial Sequence: Synthetic peptide"
GYTFTNYW

SEQ ID NO: 184 - protein, 8 aa, synthetic construct
  REGION 1..8: note = source = /note="Description of Artificial Sequence: Synthetic peptide"
IYPGGGYT

SEQ ID NO: 185 - protein, 13 aa, synthetic construct
  REGION 1..13: note = source = /note="Description of Artificial Sequence: Synthetic peptide"
ASPYYGSSYGFAF

SEQ ID NO: 186 - protein, 108 aa, synthetic construct; identical to SEQ ID NO: 178
  REGION 1..108: note = source = /note="Description of Artificial Sequence: Synthetic polypeptide"

SEQ ID NO: 187 - protein, 6 aa, synthetic construct
  REGION 1..6: note = source = /note="Description of Artificial Sequence: Synthetic peptide"
QSVRIA

SEQ ID NO: 188 - skipped

SEQ ID NO: 189 - protein, 9 aa, synthetic construct
  REGION 1..9: note = source = /note="Description of Artificial Sequence: Synthetic peptide"
LQHWNYPYT

SEQ ID NO: 190 - protein, 117 aa, synthetic construct
  REGION 1..117: note = source = /note="Description of Artificial Sequence: Synthetic polypeptide"
QVQLKESGPGLVAPSQSLSITCTVSGFSLSGYGIKWVRQPPGKGLEWLGTIWGDGSTDYNSALKSRLSISKDNSKSQVFLKMTSLQTDDTARYYCASDSLGITFGYWGQGTLVTVSA

SEQ ID NO: 191 - protein, 8 aa, synthetic construct
  REGION 1..8: note = source = /note="Description of Artificial Sequence: Synthetic peptide"
GFSLSGYG

SEQ ID NO: 192 - protein, 7 aa, synthetic construct
  REGION 1..7: note = source = /note="Description of Artificial Sequence: Synthetic peptide"
IWGDGST

SEQ ID NO: 193 - protein, 11 aa, synthetic construct
  REGION 1..11: note = source = /note="Description of Artificial Sequence: Synthetic peptide"
ASDSLGITFGY

SEQ ID NO: 194 - protein, 107 aa, synthetic construct
  REGION 1..107: note = source = /note="Description of Artificial Sequence: Synthetic polypeptide"
DIQMTQTTSSLSASLGDRVTISCRASQDISNYLNWYQQKPDGTVKLLIYYTSRLHSGVPSRFSGSGSGTDYSLTISNLEQEDIATYFCQQGNTLPLTFGAGTKLELK

SEQ ID NO: 195 - protein, 6 aa, synthetic construct
  REGION 1..6: note = source = /note="Description of Artificial Sequence: Synthetic peptide"
QDISNY

SEQ ID NO: 196 - skipped

SEQ ID NO: 197 - protein, 9 aa, synthetic construct
  REGION 1..9: note = source = /note="Description of Artificial Sequence: Synthetic peptide"
QQGNTLPLT

SEQ ID NO: 198 - protein, 120 aa, synthetic construct
  REGION 1..120: note = source = /note="Description of Artificial Sequence: Synthetic polypeptide"
QVQLKESGPGLVAPSQSLSITCTVSGFSLTSYAITWVRQPPGKGLEWLGVIWPGGGTNYNSALKSRLSISKDNSKSHLFLKMNSLQTDDTARYYCVRSYDGYLDWYFDVWGTGTTVTVSS

SEQ ID NO: 199 - protein, 8 aa, synthetic construct
  REGION 1..8: note = source = /note="Description of Artificial Sequence: Synthetic peptide"
GFSLTSYA

SEQ ID NO: 200 - protein, 7 aa, synthetic construct
  REGION 1..7: note = source = /note="Description of Artificial Sequence: Synthetic peptide"
IWPGGGT

SEQ ID NO: 201 - protein, 14 aa, synthetic construct
  REGION 1..14: note = source = /note="Description of Artificial Sequence: Synthetic peptide"
VRSYDGYLDWYFDV

SEQ ID NO: 202 - protein, 107 aa, synthetic construct
  REGION 1..107: note = source = /note="Description of Artificial Sequence: Synthetic polypeptide"
NIVMTQSPKSMSMSVGERVTLSCKASENVGTYVSWYQQKPDQSPKLLIYGASNRYTGVPDRFTGSGSATDFTLIISSVQAEDLSDYHCGQSYSYPYTFGGGTKLEII

SEQ ID NO: 203 - protein, 6 aa, synthetic construct
  REGION 1..6: note = source = /note="Description of Artificial Sequence: Synthetic peptide"
ENVGTY

SEQ ID NO: 204 - skipped

SEQ ID NO: 205 - protein, 9 aa, synthetic construct
  REGION 1..9: note = source = /note="Description of Artificial Sequence: Synthetic peptide"
GQSYSYPYT

SEQ ID NO: 206 - protein, 123 aa, synthetic construct
  REGION 1..123: note = source = /note="Description of Artificial Sequence: Synthetic polypeptide"
QIQLVQSGPDLKKPGETVKISCKASGYTFTTYGMSWVKQAPGRGLKWMGWINTYSGVSTFPDDFKGRFAFSLETSASTAYLQINNLKNEDSATYFCARLGMGSTTGAGYFDVWGTGTTVTVSS

SEQ ID NO: 207 - protein, 8 aa, synthetic construct
  REGION 1..8: note = source = /note="Description of Artificial Sequence: Synthetic peptide"
GYTFTTYG

SEQ ID NO: 208 - protein, 8 aa, synthetic construct
  REGION 1..8: note = source = /note="Description of Artificial Sequence: Synthetic peptide"
INTYSGVS

SEQ ID NO: 209 - protein, 16 aa, synthetic construct
  REGION 1..16: note = source = /note="Description of Artificial Sequence: Synthetic peptide"
ARLGMGSTTGAGYFDV

SEQ ID NO: 210 - protein, 108 aa, synthetic construct
  REGION 1..108: note = source = /note="Description of Artificial Sequence: Synthetic polypeptide"
DIVLTQSPAIMSASPGEKVTMTCSASSSVSSWYLHWYQQKSGASPKLWIYGTSNLASGVPARFSGSGSGTSYSLTISSVEAEDAATYYCQQYRSDPYTFGSGTKLEIK

SEQ ID NO: 211 - protein, 7 aa, synthetic construct
  REGION 1..7: note = source = /note="Description of Artificial Sequence: Synthetic peptide"
SSVSSWY

SEQ ID NO: 212 - skipped

SEQ ID NO: 213 - protein, 9 aa, synthetic construct
  REGION 1..9: note = source = /note="Description of Artificial Sequence: Synthetic peptide"
QQYRSDPYT

SEQ ID NO: 214 - protein, 123 aa, synthetic construct
  REGION 1..123: note = source = /note="Description of Artificial Sequence: Synthetic polypeptide"
QIQLVQSGPELKKPGETVKISCKASGYTFTTYGMSWVKQAPGKGLKWMGWINTYSGVSTYADDFEGRFAFSLETSVSTAYLQINNLKNEDTATYFCARLGRGSTTGAGYLDVWGTGTTVTVSS

SEQ ID NO: 215 - protein, 8 aa, synthetic construct
  REGION 1..8: note = source = /note="Description of Artificial Sequence: Synthetic peptide"
GYTFTTYG

SEQ ID NO: 216 - protein, 8 aa, synthetic construct
  REGION 1..8: note = source = /note="Description of Artificial Sequence: Synthetic peptide"
INTYSGVS

SEQ ID NO: 217 - protein, 16 aa, synthetic construct
  REGION 1..16: note = source = /note="Description of Artificial Sequence: Synthetic peptide"
ARLGRGSTTGAGYLDV

SEQ ID NO: 218 - protein, 108 aa, synthetic construct
  REGION 1..108: note = source = /note="Description of Artificial Sequence: Synthetic polypeptide"
DIVLTQSPAIMSASPGEKVSMTCSASSSVSSWYLHWYQQKSGASPKLWIYGTSNLASGVPARFSGSGSGTSYSLTISSVEAEDAATYYCQQYHSDPYTFGSGTKLEIK

SEQ ID NO: 219 - protein, 7 aa, synthetic construct
  REGION 1..7: note = source = /note="Description of Artificial Sequence: Synthetic peptide"
SSVSSWY

SEQ ID NO: 220 - skipped

SEQ ID NO: 221 - protein, 9 aa, synthetic construct
  REGION 1..9: note = source = /note="Description of Artificial Sequence: Synthetic peptide"
QQYHSDPYT

SEQ ID NO: 222 - protein, 123 aa, synthetic construct; identical to SEQ ID NO: 206
  REGION 1..123: note = source = /note="Description of Artificial Sequence: Synthetic polypeptide"

SEQ ID NO: 223 - protein, 8 aa, synthetic construct
  REGION 1..8: note = source = /note="Description of Artificial Sequence: Synthetic peptide"
GYTFTTYG

SEQ ID NO: 224 - protein, 8 aa, synthetic construct
  REGION 1..8: note = source = /note="Description of Artificial Sequence: Synthetic peptide"
INTYSGVS

SEQ ID NO: 225 - protein, 16 aa, synthetic construct
  REGION 1..16: note = source = /note="Description of Artificial Sequence: Synthetic peptide"
ARLGMGSTTGAGYFDV

SEQ ID NO: 226 - protein, 106 aa, synthetic construct
  REGION 1..106: note = source = /note="Description of Artificial Sequence: Synthetic polypeptide"
ENVLTQSPAIMSASLGEKVTLSCRASSSVNYMYWYQQKSDASPKLWIYYTSNLAPGVPARFSGSGSGNSYSLTISSVEGEDAATYYCQQFTSSPWTFGGGTKLEIK

SEQ ID NO: 227 - protein, 5 aa, synthetic construct
  REGION 1..5: note = source = /note="Description of Artificial Sequence: Synthetic peptide"
SSVNY

SEQ ID NO: 228 - skipped

SEQ ID NO: 229 - protein, 9 aa, synthetic construct
  REGION 1..9: note = source = /note="Description of Artificial Sequence: Synthetic peptide"
QQFTSSPWT

SEQ ID NO: 230 - protein, 114 aa, synthetic construct
  REGION 1..114: note = source = /note="Description of Artificial Sequence: Synthetic polypeptide"
EVQLQQSGPELVKPGASVKISCKASGYTFTDYSMNWVKQSHGKSLEWIGDITPNNGSPNYNQKFKDKATLTVDKSSSTVYMELRSLTSEDSAVYYCASLFFDYWGHGTTLTVSS

SEQ ID NO: 231 - protein, 8 aa, synthetic construct
  REGION 1..8: note = source = /note="Description of Artificial Sequence: Synthetic peptide"
GYTFTDYS

SEQ ID NO: 232 - protein, 8 aa, synthetic construct
  REGION 1..8: note = source = /note="Description of Artificial Sequence: Synthetic peptide"
ITPNNGSP

SEQ ID NO: 233 - protein, 7 aa, synthetic construct
  REGION 1..7: note = source = /note="Description of Artificial Sequence: Synthetic peptide"
ASLFFDY

SEQ ID NO: 234 - protein, 113 aa, synthetic construct
  REGION 1..113: note = source = /note="Description of Artificial Sequence: Synthetic polypeptide"
DIVMTQSPSSLSVSAGEKVTMSCKSSQSLLNSGNQKNYLAWYQQKPGQPPKLLIYGASTRDSGVPDRFTGSGSGTDFTLTITSVQAEDLAVYYCQNDHTYPYTFGGGTKLEIK

SEQ ID NO: 235 - protein, 12 aa, synthetic construct
  REGION 1..12: note = source = /note="Description of Artificial Sequence: Synthetic peptide"
QSLLNSGNQKNY

SEQ ID NO: 236 - skipped

SEQ ID NO: 237 - protein, 9 aa, synthetic construct
  REGION 1..9: note = source = /note="Description of Artificial Sequence: Synthetic peptide"
QNDHTYPYT

SEQ ID NO: 238 - protein, 120 aa, synthetic construct
  REGION 1..120: note = source = /note="Description of Artificial Sequence: Synthetic polypeptide"
QVQLQQPGTELVKPGASVKLSCKASGFTFTTHWMHWVRQRPGQGLEWIGNIYPSNGGSNYNEKFKTKATLTVDRSSSTAYMHLSSLTSEDSAVYYCARRVNWDGYYFDYWGQGTTLTVSS

SEQ ID NO: 239 - protein, 8 aa, synthetic construct
  REGION 1..8: note = source = /note="Description of Artificial Sequence: Synthetic peptide"
GFTFTTHW

SEQ ID NO: 240 - protein, 8 aa, synthetic construct
  REGION 1..8: note = source = /note="Description of Artificial Sequence: Synthetic peptide"
IYPSNGGS

SEQ ID NO: 241 - protein, 13 aa, synthetic construct
  REGION 1..13: note = source = /note="Description of Artificial Sequence: Synthetic peptide"
ARRVNWDGYYFDY

SEQ ID NO: 242 - protein, 107 aa, synthetic construct
  REGION 1..107: note = source = /note="Description of Artificial Sequence: Synthetic polypeptide"
DIVMTQSQKFMSTSVGDRVSVTCKASQNVGTNVAWYQQKPGQSPKLLIYSASYRYSGVPDRFTGSGSGTDFTLTISNVQSEDLADYFCQQYNSYPLTFGGGTKLEIK

SEQ ID NO: 243 - protein, 6 aa, synthetic construct
  REGION 1..6: note = source = /note="Description of Artificial Sequence: Synthetic peptide"
QNVGTN

SEQ ID NO: 244 - skipped

SEQ ID NO: 245 - protein, 9 aa, synthetic construct
  REGION 1..9: note = source = /note="Description of Artificial Sequence: Synthetic peptide"
QQYNSYPLT

SEQ ID NO: 246 - protein, 118 aa, synthetic construct
  REGION 1..118: note = source = /note="Description of Artificial Sequence: Synthetic polypeptide"
QVQLQESGTELVKPGASVKLSCKASGYTFTSYWIHWVKQRPGQGLEWIGNINPSNGGTNYNEKFKSKAALTVDKSSSTAYMQLSSLTSEDSAVYYCARRGLPYFFDYWGQGTTLTVSS

SEQ ID NO: 247 - protein, 8 aa, synthetic construct
  REGION 1..8: note = source = /note="Description of Artificial Sequence: Synthetic peptide"
GYTFTSYW

SEQ ID NO: 248 - protein, 8 aa, synthetic construct
  REGION 1..8: note = source = /note="Description of Artificial Sequence: Synthetic peptide"
INPSNGGT

SEQ ID NO: 249 - protein, 11 aa, synthetic construct
  REGION 1..11: note = source = /note="Description of Artificial Sequence: Synthetic peptide"
ARRGLPYFFDY

SEQ ID NO: 250 - protein, 107 aa, synthetic construct
  REGION 1..107: note = source = /note="Description of Artificial Sequence: Synthetic polypeptide"
DIVMTQSQKFMSTSVGDRVSVTCKGSQNVGYNVAWYQQKPGQSPKALVYSASDRHSGVPDRFAGSGSGTDFTLTISNVQSEDLAEYFCQQYNSYPLTFGAGTKLELK

SEQ ID NO: 251 - protein, 6 aa, synthetic construct
  REGION 1..6: note = source = /note="Description of Artificial Sequence: Synthetic peptide"
QNVGYN

SEQ ID NO: 252 - skipped

SEQ ID NO: 253 - protein, 9 aa, synthetic construct
  REGION 1..9: note = source = /note="Description of Artificial Sequence: Synthetic peptide"
QQYNSYPLT

SEQ ID NO: 254 - protein, 120 aa, synthetic construct; identical to SEQ ID NO: 4
  REGION 1..120: note = source = /note="Description of Artificial Sequence: Synthetic polypeptide"

SEQ ID NO: 255 - protein, 8 aa, synthetic construct
  REGION 1..8: note = source = /note="Description of Artificial Sequence: Synthetic peptide"
GYTFTDYN

SEQ ID NO: 256 - protein, 8 aa, synthetic construct
  REGION 1..8: note = source = /note="Description of Artificial Sequence: Synthetic peptide"
IYPYIGGS

SEQ ID NO: 257 - protein, 13 aa, synthetic construct
  REGION 1..13: note = source = /note="Description of Artificial Sequence: Synthetic peptide"
AREDKTARNAMDY

SEQ ID NO: 258 - protein, 107 aa, synthetic construct
  REGION 1..107: note = source = /note="Description of Artificial Sequence: Synthetic polypeptide"
DIQMTQSPSSLSASVGDRVTITCRVSENIYDVLAWYQQKPGKAPKLLIYEATNLAEGVPSRFSGSGSGTDFTLTISSLQPEDFATYYCQHFWGTPYTFGQGTKLEIK

SEQ ID NO: 259 - protein, 6 aa, synthetic construct
  REGION 1..6: note = source = /note="Description of Artificial Sequence: Synthetic peptide"
ENIYDV

SEQ ID NO: 260 - skipped

SEQ ID NO: 261 - protein, 9 aa, synthetic construct
  REGION 1..9: note = source = /note="Description of Artificial Sequence: Synthetic peptide"
QHFWGTPYT

SEQ ID NO: 262 - protein, 119 aa, synthetic construct
  REGION 1..119: note = source = /note="Description of Artificial Sequence: Synthetic polypeptide"
QVQLVQSGAEVKKPGASVKVSCKASGYAFTNYLIEWVRQAPGQGLEWIGVINPGSGGIYYAQKFQGRVTMTADTSTSTVYMELSSLRSEDTAVYYCARSETHDTWFAYWGQGTLVTVSS

SEQ ID NO: 263 - protein, 8 aa, synthetic construct
  REGION 1..8: note = source = /note="Description of Artificial Sequence: Synthetic peptide"
GYAFTNYL

SEQ ID NO: 264 - protein, 8 aa, synthetic construct
  REGION 1..8: note = source = /note="Description of Artificial Sequence: Synthetic peptide"
INPGSGGI

SEQ ID NO: 265 - protein, 12 aa, synthetic construct
  REGION 1..12: note = source = /note="Description of Artificial Sequence: Synthetic peptide"
ARSETHDTWFAY

SEQ ID NO: 266 - protein, 446 aa, synthetic construct
  REGION 1..446: note = source = /note="Description of Artificial Sequence: Synthetic polypeptide"
QVQLVQSGAEVKKPGASVKVSCKASGYAFTNYLIEWVRQAPGQGLEWIGVINPGSGGIYYAQKFQGRVTMTADTSTSTVYMELSSLRSEDTAVYYCARSETHDTWFAYWGQGTLVTVSSASTKGPSVFPLAPCSRSTSESTAALGCLVKDYFPEPVTVSWNSGALTSGVHTFPAVLQSSGLYSLSSVVTVPSSSLGTKTYTCNVDHKPSNTKVDKRVESKYGPPCPPCPAPEFLGGPSVFLFPPKPKDTLMISRTPEVTCVVVDVSQEDPEVQFNWYVDGVEVHNAKTKPREEQFNSTYRVVSVLTVLHQDWLNGKEYKCKVSNKGLPSSIEKTISKAKGQPREPQVYTLPPSQEEMTKNQVSLTCLVKGFYPSDIAVEWESNGQPENNYKTTPPVLDSDGSFFLYSRLTVDKSRWQEGNVFSCSVMHEALHNHYTQKSLSLSPGK

SEQ ID NO: 267 - protein, 107 aa, synthetic construct
  REGION 1..107: note = source = /note="Description of Artificial Sequence: Synthetic polypeptide"
DIQMTQSPSSLSASVGDRVTITCKASQSVRIAVAWFQQKPGKAPKALIYLASTRHTGVPSRFSGSGSGTDFTLTISSVQPEDFATYYCLQHWNYPYTFGQGTKLEIK

SEQ ID NO: 268 - protein, 6 aa, synthetic construct
  REGION 1..6: note = source = /note="Description of Artificial Sequence: Synthetic peptide"
QSVRIA

SEQ ID NO: 269 - skipped

SEQ ID NO: 270 - protein, 9 aa, synthetic construct
  REGION 1..9: note = source = /note="Description of Artificial Sequence: Synthetic peptide"
LQHWNYPYT

SEQ ID NO: 271 - protein, 214 aa, synthetic construct
  REGION 1..214: note = source = /note="Description of Artificial Sequence: Synthetic polypeptide"
DIQMTQSPSSLSASVGDRVTITCKASQSVRIAVAWFQQKPGKAPKALIYLASTRHTGVPSRFSGSGSGTDFTLTISSVQPEDFATYYCLQHWNYPYTFGQGTKLEIKRTVAAPSVFIFPPSDEQLKSGTASVVCLLNNFYPREAKVQWKVDNALQSGNSQESVTEQDSKDSTYSLSSTLTLSKADYEKHKVYACEVTHQGLSSPVTKSFNRGEC

SEQ ID NO: 272 - protein, 120 aa, synthetic construct
  REGION 1..120: note = source = /note="Description of Artificial Sequence: Synthetic polypeptide"
QMQLVQSGAEVKKPGSSVKVSCKASGGTFSSYAISWVRQAPGQGLEWMGGIIPIFGTANYAQKFQGRVTITADESTSTAYMELSSLRSEDTAVYYCAREEVSSPYGMDVWGQGTTVTVSS

SEQ ID NO: 273 - protein, 8 aa, synthetic construct
  REGION 1..8: note = source = /note="Description of Artificial Sequence: Synthetic peptide"
GGTFSSYA

SEQ ID NO: 274 - protein, 8 aa, synthetic construct
  REGION 1..8: note = source = /note="Description of Artificial Sequence: Synthetic peptide"
IIPIFGTA

SEQ ID NO: 275 - protein, 13 aa, synthetic construct
  REGION 1..13: note = source = /note="Description of Artificial Sequence: Synthetic peptide"
AREEVSSPYGMDV

SEQ ID NO: 276 - protein, 450 aa, synthetic construct
  REGION 1..450: note = source = /note="Description of Artificial Sequence: Synthetic polypeptide"
QMQLVQSGAEVKKPGSSVKVSCKASGGTFSSYAISWVRQAPGQGLEWMGGIIPIFGTANYAQKFQGRVTITADESTSTAYMELSSLRSEDTAVYYCAREEVSSPYGMDVWGQGTTVTVSSASTKGPSVFPLAPSSKSTSGGTAALGCLVKDYFPEPVTVSWNSGALTSGVHTFPAVLQSSGLYSLSSVVTVPSSSLGTQTYICNVNHKPSNTKVDKKVEPKSCDKTHTCPPCPAPELLGGPSVFLFPPKPKDTLMISRTPEVTCVVVDVSHEDPEVKFNWYVDGVEVHNAKTKPREEQYNSTYRVVSVLTVLHQDWLNGKEYKCKVSNKALPAPIEKTISKAKGQPREPQVYTLPPSREEMTKNQVSLTCLVKGFYPSDIAVEWESNGQPENNYKTTPPVLDSDGSFFLYSKLTVDKSRWQQGNVFSCSVMHEALHNHYTQKSLSLSPGK

SEQ ID NO: 277 - protein, 111 aa, synthetic construct
  REGION 1..111: note = source = /note="Description of Artificial Sequence: Synthetic polypeptide"
QAVVTQEPSLTVSPGGTVTLTCGTSTGAVTSGHYPYWFQQKPGQAPKTLIYDTGNKHSWTPARFSGSLLGGKAALTLSGAQPEDEADYYCLLSYSGASWVFGGGTKLTVLG

SEQ ID NO: 278 - protein, 9 aa, synthetic construct
  REGION 1..9: note = source = /note="Description of Artificial Sequence: Synthetic peptide"
TGAVTSGHY

SEQ ID NO: 279 - skipped

SEQ ID NO: 280 - protein, 10 aa, synthetic construct
  REGION 1..10: note = source = /note="Description of Artificial Sequence: Synthetic peptide"
LLSYSGASWV

SEQ ID NO: 281 - protein, 216 aa, synthetic construct
  REGION 1..216: note = source = /note="Description of Artificial Sequence: Synthetic polypeptide"
QAVVTQEPSLTVSPGGTVTLTCGTSTGAVTSGHYPYWFQQKPGQAPKTLIYDTGNKHSWTPARFSGSLLGGKAALTLSGAQPEDEADYYCLLSYSGASWVFGGGTKLTVLGQPKAAPSVTLFPPSSEELQANKATLVCLISDFYPGAVTVAWKADSSPVKAGVETTTPSKQSNNKYAASSYLSLTPEQWKSHRSYSCQVTHEGSTVEKTVAPTECS

SEQ ID NO: 282 - protein, 121 aa, synthetic construct
  REGION 1..121: note = source = /note="Description of Artificial Sequence: Synthetic polypeptide"
QVQLVQSGAEVKKPGASVKVSCKVSGFSLSHFSMHWVRQVPGKGLEWLGGFDPEEGGTIPAQKFQGRLTMTEDTSTETAYMELSSLRSEDTAVYYCATGIWYSSGWPVDYWGPGTLVTVSS

SEQ ID NO: 283 - protein, 8 aa, synthetic construct
  REGION 1..8: note = source = /note="Description of Artificial Sequence: Synthetic peptide"
GFSLSHFS

SEQ ID NO: 284 - protein, 8 aa, synthetic construct
  REGION 1..8: note = source = /note="Description of Artificial Sequence: Synthetic peptide"
FDPEEGGT

SEQ ID NO: 285 - protein, 14 aa, synthetic construct
  REGION 1..14: note = source = /note="Description of Artificial Sequence: Synthetic peptide"
ATGIWYSSGWPVDY

SEQ ID NO: 286 - protein, 458 aa, synthetic construct
  REGION 1..458: note = source = /note="Description of Artificial Sequence: Synthetic polypeptide"
EVQLVQSGAEVKKPGSSVKVSCKASGGTFSSYAISWVRQAPGQGLEWMGGIIPIFGTANYAQKFQGRVTITADKSTSTAYMELSSLRSEDTAVYYCARGPWYYDSSGYSSYAYYMDVWGQGTTVTVSSASTKGPSVFPLAPSSKSTSGGTAALGCLVKDYFPEPVTVSWNSGALTSGVHTFPAVLQSSGLYSLSSVVTVPSSSLGTQTYICNVNHKPSNTKVDKKVEPKSCDKTHTCPPCPAPELLGGPSVFLFPPKPKDTLMISRTPEVTCVVVDVSHEDPEVKFNWYVDGVEVHNAKTKPREEQYNSTYRVVSVLTVLHQDWLNGKEYKCKVSNKALPAPIEKTISKAKGQPREPQVYTLPPSREEMTKNQVSLTCLVKGFYPSDIAVEWESNGQPENNYKTTPPVLDSDGSFFLYSKLTVDKSRWQQGNVFSCSVMHEALHNHYTQKSLSLSPGK

SEQ ID NO: 287 - protein, 113 aa, synthetic construct
  REGION 1..113: note = source = /note="Description of Artificial Sequence: Synthetic polypeptide"
DVVMTQSPLSLPVTPGGPASISCRSSQSLLDSSGYNYVDWYLQKPGQSPQLLISLGSDRASGVPDRFSGSGSGTDFTLKISRVEAEDVGIYYCMQALQTPITFGQGTRLEIKR

SEQ ID NO: 288 - protein, 11 aa, synthetic construct
  REGION 1..11: note = source = /note="Description of Artificial Sequence: Synthetic peptide"
QSLLDSSGYNY

SEQ ID NO: 289 - skipped

SEQ ID NO: 290 - protein, 9 aa, synthetic construct
  REGION 1..9: note = source = /note="Description of Artificial Sequence: Synthetic peptide"
MQALQTPIT

SEQ ID NO: 291 - protein, 219 aa, synthetic construct
  REGION 1..219: note = source = /note="Description of Artificial Sequence: Synthetic polypeptide"
DVVMTQSPLSLPVTPGGPASISCRSSQSLLDSSGYNYVDWYLQKPGQSPQLLISLGSDRASGVPDRFSGSGSGTDFTLKISRVEAEDVGIYYCMQALQTPITFGQGTRLEIKRTVAAPSVFIFPPSDEQLKSGTASVVCLLNNFYPREAKVQWKVDNALQSGNSQESVTEQDSKDSTYSLSSTLTLSKADYEKHKVYACEVTHQGLSSPVTKSFNRGEC

SEQ ID NO: 292 - protein, 125 aa, synthetic construct
  REGION 1..125: note = source = /note="Description of Artificial Sequence: Synthetic polypeptide"
EVQLVQSGAEVKKPGASVKVSCKVSGYTLTELSMHWVRQAPGKGLEWMGGFDPEDGETIYAQKFQGRVTMTEDTSTDTAYMELSSLRSEDTAVYYCATVSRVRGVINYYYYMDVWGKGTTVTVSS

SEQ ID NO: 293 - protein, 8 aa, synthetic construct
  REGION 1..8: note = source = /note="Description of Artificial Sequence: Synthetic peptide"
GYTLTELS

SEQ ID NO: 294 - protein, 8 aa, synthetic construct
  REGION 1..8: note = source = /note="Description of Artificial Sequence: Synthetic peptide"
FDPEDGET

SEQ ID NO: 295 - protein, 18 aa, synthetic construct
  REGION 1..18: note = source = /note="Description of Artificial Sequence: Synthetic peptide"
ATVSRVRGVINYYYYMDV

SEQ ID NO: 296 - protein, 455 aa, synthetic construct
  REGION 1..455: note = source = /note="Description of Artificial Sequence: Synthetic polypeptide"
EVQLVQSGAEVKKPGASVKVSCKVSGYTLTELSMHWVRQAPGKGLEWMGGFDPEDGETIYAQKFQGRVTMTEDTSTDTAYMELSSLRSEDTAVYYCATVSRVRGVINYYYYMDVWGKGTTVTVSSASTKGPSVFPLAPSSKSTSGGTAALGCLVKDYFPEPVTVSWNSGALTSGVHTFPAVLQSSGLYSLSSVVTVPSSSLGTQTYICNVNHKPSNTKVDKKVEPKSCDKTHTCPPCPAPELLGGPSVFLFPPKPKDTLMISRTPEVTCVVVDVSHEDPEVKFNWYVDGVEVHNAKTKPREEQYNSTYRVVSVLTVLHQDWLNGKEYKCKVSNKALPAPIEKTISKAKGQPREPQVYTLPPSREEMTKNQVSLTCLVKGFYPSDIAVEWESNGQPENNYKTTPPVLDSDGSFFLYSKLTVDKSRWQQGNVFSCSVMHEALHNHYTQKSLSLSPGK

SEQ ID NO: 297 - protein, 113 aa, synthetic construct
  REGION 1..113: note = source = /note="Description of Artificial Sequence: Synthetic polypeptide"
DVVMTQSPLSLPVTPGEPASISCRSSQSLLYRNGNNYLDWYLQKPGQSPQLLIYLGSNRASGVPDRFSGSGSGTDFTLKISRVEAEDVGVYYCMQALQTPPTFGGGTKLEIKR

SEQ ID NO: 298 - protein, 11 aa, synthetic construct
  REGION 1..11: note = source = /note="Description of Artificial Sequence: Synthetic peptide"
QSLLYRNGNNY

SEQ ID NO: 299 - skipped

SEQ ID NO: 300 - protein, 9 aa, synthetic construct
  REGION 1..9: note = source = /note="Description of Artificial Sequence: Synthetic peptide"
MQALQTPPT

SEQ ID NO: 301 - protein, 219 aa, synthetic construct
  REGION 1..219: note = source = /note="Description of Artificial Sequence: Synthetic polypeptide"
DVVMTQSPLSLPVTPGEPASISCRSSQSLLYRNGNNYLDWYLQKPGQSPQLLIYLGSNRASGVPDRFSGSGSGTDFTLKISRVEAEDVGVYYCMQALQTPPTFGGGTKLEIKRTVAAPSVFIFPPSDEQLKSGTASVVCLLNNFYPREAKVQWKVDNALQSGNSQESVTEQDSKDSTYSLSSTLTLSKADYEKHKVYACEVTHQGLSSPVTKSFNRGEC

SEQ ID NO: 302 - protein, 120 aa, synthetic construct
  REGION 1..120: note = source = /note="Description of Artificial Sequence: Synthetic polypeptide"
QVQLVQSGAEVRRPGSSVRVSCKPSGGTFGTYAFTWVRQAPGQGLEWMGGITPISATINRAQNLQDRLTITADESTTTVHMDLTSLRSEDTAVYYCARGFEYSDGLLDDWGQGTLVTVSS

SEQ ID NO: 303 - protein, 8 aa, synthetic construct
  REGION 1..8: note = source = /note="Description of Artificial Sequence: Synthetic peptide"
GGTFGTYA

SEQ ID NO: 304 - protein, 8 aa, synthetic construct
  REGION 1..8: note = source = /note="Description of Artificial Sequence: Synthetic peptide"
ITPISATI

SEQ ID NO: 305 - protein, 13 aa, synthetic construct
  REGION 1..13: note = source = /note="Description of Artificial Sequence: Synthetic peptide"
ARGFEYSDGLLDD

SEQ ID NO: 306 - protein, 450 aa, synthetic construct
  REGION 1..450: note = source = /note="Description of Artificial Sequence: Synthetic polypeptide"
QVQLVQSGAEVRRPGSSVRVSCKPSGGTFGTYAFTWVRQAPGQGLEWMGGITPISATINRAQNLQDRLTITADESTTTVHMDLTSLRSEDTAVYYCARGFEYSDGLLDDWGQGTLVTVSSASTKGPSVFPLAPSSKSTSGGTAALGCLVKDYFPEPVTVSWNSGALTSGVHTFPAVLQSSGLYSLSSVVTVPSSSLGTQTYICNVNHKPSNTKVDKKVEPKSCDKTHTCPPCPAPELLGGPSVFLFPPKPKDTLMISRTPEVTCVVVDVSHEDPEVKFNWYVDGVEVHNAKTKPREEQYNSTYRVVSVLTVLHQDWLNGKEYKCKVSNKALPAPIEKTISKAKGQPREPQVYTLPPSREEMTKNQVSLTCLVKGFYPSDIAVEWESNGQPENNYKTTPPVLDSDGSFFLYSKLTVDKSRWQQGNVFSCSVMHEALHNHYTQKSLSLSPGK

SEQ ID NO: 307 - protein, 114 aa, synthetic construct
  REGION 1..114: note = source = /note="Description of Artificial Sequence: Synthetic polypeptide"
DIVMTQTPLSLPVIPGEPASISCRSSQSLFYSDDGNTYLDWYLQKPGQSPQLLIYRLSHRASGVPDRFSGSGSGTDFTLKISRVEAEDVGVYYCMQHMEFPLTFGGGTKVEIKR

SEQ ID NO: 308 - protein, 12 aa, synthetic construct
  REGION 1..12: note = source = /note="Description of Artificial Sequence: Synthetic peptide"
QSLFYSDDGNTY

SEQ ID NO: 309 - skipped

SEQ ID NO: 310 - protein, 9 aa, synthetic construct
  REGION 1..9: note = source = /note="Description of Artificial Sequence: Synthetic peptide"
MQHMEFPLT

SEQ ID NO: 311 - protein, 220 aa, synthetic construct
  REGION 1..220: note = source = /note="Description of Artificial Sequence: Synthetic polypeptide"
DIVMTQTPLSLPVIPGEPASISCRSSQSLFYSDDGNTYLDWYLQKPGQSPQLLIYRLSHRASGVPDRFSGSGSGTDFTLKISRVEAEDVGVYYCMQHMEFPLTFGGGTKVEIKRTVAAPSVFIFPPSDEQLKSGTASVVCLLNNFYPREAKVQWKVDNALQSGNSQESVTEQDSKDSTYSLSSTLTLSKADYEKHKVYACEVTHQGLSSPVTKSFNRGEC

SEQ ID NO: 312 - protein, 117 aa, synthetic construct
  REGION 1..117: note = source = /note="Description of Artificial Sequence: Synthetic polypeptide"
QVQLQESGPGLVKPSGTLSLTCVVSSGSISSTNWWTWVRQPPGKGLEWIGEIYHSGSTSYNSSLKSRVTISEDKSKNQISLRLSSVTAADTAVYYCARVGPAAIYYWGQGTLVTVSS

SEQ ID NO: 313 - protein, 9 aa, synthetic construct
  REGION 1..9: note = source = /note="Description of Artificial Sequence: Synthetic peptide"
SGSISSTNW

SEQ ID NO: 314 - protein, 7 aa, synthetic construct
  REGION 1..7: note = source = /note="Description of Artificial Sequence: Synthetic peptide"
IYHSGST

SEQ ID NO: 315 - protein, 10 aa, synthetic construct
  REGION 1..10: note = source = /note="Description of Artificial Sequence: Synthetic peptide"
ARVGPAAIYY

SEQ ID NO: 316 - protein, 447 aa, synthetic construct
  REGION 1..447: note = source = /note="Description of Artificial Sequence: Synthetic polypeptide"
QVQLQESGPGLVKPSGTLSLTCVVSSGSISSTNWWTWVRQPPGKGLEWIGEIYHSGSTSYNSSLKSRVTISEDKSKNQISLRLSSVTAADTAVYYCARVGPAAIYYWGQGTLVTVSSASTKGPSVFPLAPSSKSTSGGTAALGCLVKDYFPEPVTVSWNSGALTSGVHTFPAVLQSSGLYSLSSVVTVPSSSLGTQTYICNVNHKPSNTKVDKKVEPKSCDKTHTCPPCPAPELLGGPSVFLFPPKPKDTLMISRTPEVTCVVVDVSHEDPEVKFNWYVDGVEVHNAKTKPREEQYNSTYRVVSVLTVLHQDWLNGKEYKCKVSNKALPAPIEKTISKAKGQPREPQVYTLPPSREEMTKNQVSLTCLVKGFYPSDIAVEWESNGQPENNYKTTPPVLDSDGSFFLYSKLTVDKSRWQQGNVFSCSVMHEALHNHYTQKSLSLSPGK

SEQ ID NO: 317 - protein, 111 aa, synthetic construct
  REGION 1..111: note = source = /note="Description of Artificial Sequence: Synthetic polypeptide"
QAGLTQPPSVSKGLRQTATLTCTGNSNNVGYEGAAWLQQHQGHAPKLLLYRNNNRPSGISKRFSASRSGNTASLTITGLQPEDEADYYCSAWDSSLNAVVFGGGTQLTVLG

SEQ ID NO: 318 - protein, 8 aa, synthetic construct
  REGION 1..8: note = source = /note="Description of Artificial Sequence: Synthetic peptide"
SNNVGYEG

SEQ ID NO: 319 - skipped

SEQ ID NO: 320 - protein, 11 aa, synthetic construct
  REGION 1..11: note = source = /note="Description of Artificial Sequence: Synthetic peptide"
SAWDSSLNAVV

SEQ ID NO: 321 - protein, 216 aa, synthetic construct
  REGION 1..216: note = source = /note="Description of Artificial Sequence: Synthetic polypeptide"
QAGLTQPPSVSKGLRQTATLTCTGNSNNVGYEGAAWLQQHQGHAPKLLLYRNNNRPSGISKRFSASRSGNTASLTITGLQPEDEADYYCSAWDSSLNAVVFGGGTQLTVLGQPKAAPSVTLFPPSSEELQANKATLVCLISDFYPGAVTVAWKADSSPVKAGVETTTPSKQSNNKYAASSYLSLTPEQWKSHRSYSCQVTHEGSTVEKTVAPTECS

SEQ ID NO: 322 - protein, 128 aa, synthetic construct
  REGION 1..128: note = source = /note="Description of Artificial Sequence: Synthetic polypeptide"
EVQLVQSGAEVKKPGASVKVSCKVSGYTLTELSMHWVRQAPGKGLEWMGGFDPEDGETIYAQKFQGRVTMTEDTSTDTAYMELSSLRSEDTAVYYCATAKPGIAVAGQNYYYYYMDVWGKGTTVTVSS

SEQ ID NO: 323 - protein, 8 aa, synthetic construct
  REGION 1..8: note = source = /note="Description of Artificial Sequence: Synthetic peptide"
GYTLTELS

SEQ ID NO: 324 - protein, 8 aa, synthetic construct
  REGION 1..8: note = source = /note="Description of Artificial Sequence: Synthetic peptide"
FDPEDGET

SEQ ID NO: 325 - protein, 21 aa, synthetic construct
  REGION 1..21: note = source = /note="Description of Artificial Sequence: Synthetic peptide"
ATAKPGIAVAGQNYYYYYMDV

SEQ ID NO: 326 - protein, 458 aa, synthetic construct
  REGION 1..458: note = source = /note="Description of Artificial Sequence: Synthetic polypeptide"
EVQLVQSGAEVKKPGASVKVSCKVSGYTLTELSMHWVRQAPGKGLEWMGGFDPEDGETIYAQKFQGRVTMTEDTSTDTAYMELSSLRSEDTAVYYCATAKPGIAVAGQNYYYYYMDVWGKGTTVTVSSASTKGPSVFPLAPSSKSTSGGTAALGCLVKDYFPEPVTVSWNSGALTSGVHTFPAVLQSSGLYSLSSVVTVPSSSLGTQTYICNVNHKPSNTKVDKKVEPKSCDKTHTCPPCPAPELLGGPSVFLFPPKPKDTLMISRTPEVTCVVVDVSHEDPEVKFNWYVDGVEVHNAKTKPREEQYNSTYRVVSVLTVLHQDWLNGKEYKCKVSNKALPAPIEKTISKAKGQPREPQVYTLPPSREEMTKNQVSLTCLVKGFYPSDIAVEWESNGQPENNYKTTPPVLDSDGSFFLYSKLTVDKSRWQQGNVFSCSVMHEALHNHYTQKSLSLSPGK

SEQ ID NO: 327 - protein, 113 aa, synthetic construct; identical to SEQ ID NO: 297
  REGION 1..113: note = source = /note="Description of Artificial Sequence: Synthetic polypeptide"

SEQ ID NO: 328 - protein, 11 aa, synthetic construct
  REGION 1..11: note = source = /note="Description of Artificial Sequence: Synthetic peptide"
QSLLYRNGNNY

SEQ ID NO: 329 - skipped

SEQ ID NO: 330 - protein, 9 aa, synthetic construct
  REGION 1..9: note = source = /note="Description of Artificial Sequence: Synthetic peptide"
MQALQTPPT

SEQ ID NO: 331 - protein, 219 aa, synthetic construct; identical to SEQ ID NO: 301
  REGION 1..219: note = source = /note="Description of Artificial Sequence: Synthetic polypeptide"

SEQ ID NO: 332 - protein, 124 aa, synthetic construct
  REGION 1..124: note = source = /note="Description of Artificial Sequence: Synthetic polypeptide"
EVQLVESGGGLVQPGRSLRLSCAASGFTFSSYAMHWVRQAPGKGLEWVAVISYDGSNKYYADSVKGRFTISRDNSKNTLYLQMNSLRAEDTAVYYCASSPIGYSYGYWGGMDVWGQGTTVTVSS

SEQ ID NO: 333 - protein, 8 aa, synthetic construct
  REGION 1..8: note = source = /note="Description of Artificial Sequence: Synthetic peptide"
GFTFSSYA

SEQ ID NO: 334 - protein, 8 aa, synthetic construct
  REGION 1..8: note = source = /note="Description of Artificial Sequence: Synthetic peptide"
ISYDGSNK

SEQ ID NO: 335 - protein, 17 aa, synthetic construct
  REGION 1..17: note = source = /note="Description of Artificial Sequence: Synthetic peptide"
ASSPIGYSYGYWGGMDV

SEQ ID NO: 336 - protein, 454 aa, synthetic construct
  REGION 1..454: note = source = /note="Description of Artificial Sequence: Synthetic polypeptide"
EVQLVESGGGLVQPGRSLRLSCAASGFTFSSYAMHWVRQAPGKGLEWVAVISYDGSNKYYADSVKGRFTISRDNSKNTLYLQMNSLRAEDTAVYYCASSPIGYSYGYWGGMDVWGQGTTVTVSSASTKGPSVFPLAPSSKSTSGGTAALGCLVKDYFPEPVTVSWNSGALTSGVHTFPAVLQSSGLYSLSSVVTVPSSSLGTQTYICNVNHKPSNTKVDKKVEPKSCDKTHTCPPCPAPELLGGPSVFLFPPKPKDTLMISRTPEVTCVVVDVSHEDPEVKFNWYVDGVEVHNAKTKPREEQYNSTYRVVSVLTVLHQDWLNGKEYKCKVSNKALPAPIEKTISKAKGQPREPQVYTLPPSREEMTKNQVSLTCLVKGFYPSDIAVEWESNGQPENNYKTTPPVLDSDGSFFLYSKLTVDKSRWQQGNVFSCSVMHEALHNHYTQKSLSLSPGK

SEQ ID NO: 337 - protein, 116 aa, synthetic construct
  REGION 1..116: note = source = /note="Description of Artificial Sequence: Synthetic polypeptide"
QAVLTQPASLSASPGASASLTCTLRSGIDVRTNKIFWYQVKPGSPPQHLLTFQSDSDKQQGSGVPSRFSGSKDASANAGILIISGLQSEDEADYYCLIWHTSGWVFGGGTQLTVLG

SEQ ID NO: 338 - protein, 9 aa, synthetic construct
  REGION 1..9: note = source = /note="Description of Artificial Sequence: Synthetic peptide"
SGIDVRTNK

SEQ ID NO: 339 - protein, 7 aa, synthetic construct
  REGION 1..7: note = source = /note="Description of Artificial Sequence: Synthetic peptide"
FQSDSDK

SEQ ID NO: 340 - protein, 9 aa, synthetic construct
  REGION 1..9: note = source = /note="Description of Artificial Sequence: Synthetic peptide"
LIWHTSGWV

SEQ ID NO: 341 - protein, 221 aa, synthetic construct
  REGION 1..221: note = source = /note="Description of Artificial Sequence: Synthetic polypeptide"
QAVLTQPASLSASPGASASLTCTLRSGIDVRTNKIFWYQVKPGSPPQHLLTFQSDSDKQQGSGVPSRFSGSKDASANAGILIISGLQSEDEADYYCLIWHTSGWVFGGGTQLTVLGQPKAAPSVTLFPPSSEELQANKATLVCLISDFYPGAVTVAWKADSSPVKAGVETTTPSKQSNNKYAASSYLSLTPEQWKSHRSYSCQVTHEGSTVEKTVAPTECS

SEQ ID NO: 342 - protein, 124 aa, synthetic construct
  REGION 1..124: note = source = /note="Description of Artificial Sequence: Synthetic polypeptide"
EVQLVQSGAEVKKPGASVKVSCKVSGYTLTELSMHWVRQAPGKGLEWMGGFDPEDGETIYAQKFQGRVTMTEDTSTDTAYMELSSLRSEDTAVYYCATGPAAAGVGYYYYMDVWGKGTTVTVSS

SEQ ID NO: 343 - protein, 8 aa, synthetic construct
  REGION 1..8: note = source = /note="Description of Artificial Sequence: Synthetic peptide"
GYTLTELS

SEQ ID NO: 344 - protein, 8 aa, synthetic construct
  REGION 1..8: note = source = /note="Description of Artificial Sequence: Synthetic peptide"
FDPEDGET

SEQ ID NO: 345 - protein, 17 aa, synthetic construct
  REGION 1..17: note = source = /note="Description of Artificial Sequence: Synthetic peptide"
ATGPAAAGVGYYYYMDV

SEQ ID NO: 346 - protein, 454 aa, synthetic construct
  REGION 1..454: note = source = /note="Description of Artificial Sequence: Synthetic polypeptide"
EVQLVQSGAEVKKPGASVKVSCKVSGYTLTELSMHWVRQAPGKGLEWMGGFDPEDGETIYAQKFQGRVTMTEDTSTDTAYMELSSLRSEDTAVYYCATGPAAAGVGYYYYMDVWGKGTTVTVSSASTKGPSVFPLAPSSKSTSGGTAALGCLVKDYFPEPVTVSWNSGALTSGVHTFPAVLQSSGLYSLSSVVTVPSSSLGTQTYICNVNHKPSNTKVDKKVEPKSCDKTHTCPPCPAPELLGGPSVFLFPPKPKDTLMISRTPEVTCVVVDVSHEDPEVKFNWYVDGVEVHNAKTKPREEQYNSTYRVVSVLTVLHQDWLNGKEYKCKVSNKALPAPIEKTISKAKGQPREPQVYTLPPSREEMTKNQVSLTCLVKGFYPSDIAVEWESNGQPENNYKTTPPVLDSDGSFFLYSKLTVDKSRWQQGNVFSCSVMHEALHNHYTQKSLSLSPGK

SEQ ID NO: 347 - protein, 113 aa, synthetic construct
  REGION 1..113: note = source = /note="Description of Artificial Sequence: Synthetic polypeptide"
DVVMTQSPLSLPVTPGEPASISCRSSQSLLYRNGYNYLDWYLQKPGQSPQLLIYLGSNRASGVPDRFSGSGSGTDFTLKISRVEAEDVGVYYCMQALQTPPTFGQGTKVEIKR

SEQ ID NO: 348 - protein, 11 aa, synthetic construct
  REGION 1..11: note = source = /note="Description of Artificial Sequence: Synthetic peptide"
QSLLYRNGYNY

SEQ ID NO: 349 - skipped

SEQ ID NO: 350 - protein, 9 aa, synthetic construct
  REGION 1..9: note = source = /note="Description of Artificial Sequence: Synthetic peptide"
MQALQTPPT

SEQ ID NO: 351 - protein, 219 aa, synthetic construct
  REGION 1..219: note = source = /note="Description of Artificial Sequence: Synthetic polypeptide"
DVVMTQSPLSLPVTPGEPASISCRSSQSLLYRNGYNYLDWYLQKPGQSPQLLIYLGSNRASGVPDRFSGSGSGTDFTLKISRVEAEDVGVYYCMQALQTPPTFGQGTKVEIKRTVAAPSVFIFPPSDEQLKSGTASVVCLLNNFYPREAKVQWKVDNALQSGNSQESVTEQDSKDSTYSLSSTLTLSKADYEKHKVYACEVTHQGLSSPVTKSFNRGEC

SEQ ID NO: 352 - protein, 127 aa, synthetic construct
  REGION 1..127: note = source = /note="Description of Artificial Sequence: Synthetic polypeptide"
EVQLVETGGGLIQPGRSLRLSCAASGFTFSSYAMHWVRQAPGKGLEWVAVISYDGSNKYYADSVKGRFTISRDNSKNTLYLQMNSLRAEDTAVYYCARDVMVYCSSTSCYFYGMDVWGQGTTVTVSS

SEQ ID NO: 353 - protein, 8 aa, synthetic construct
  REGION 1..8: note = source = /note="Description of Artificial Sequence: Synthetic peptide"
GFTFSSYA

SEQ ID NO: 354 - protein, 8 aa, synthetic construct
  REGION 1..8: note = source = /note="Description of Artificial Sequence: Synthetic peptide"
ISYDGSNK

SEQ ID NO: 355 - protein, 20 aa, synthetic construct
  REGION 1..20: note = source = /note="Description of Artificial Sequence: Synthetic peptide"
ARDVMVYCSSTSCYFYGMDV

SEQ ID NO: 356 - protein, 457 aa, synthetic construct
  REGION 1..457: note = source = /note="Description of Artificial Sequence: Synthetic polypeptide"
EVQLVETGGGLIQPGRSLRLSCAASGFTFSSYAMHWVRQAPGKGLEWVAVISYDGSNKYYADSVKGRFTISRDNSKNTLYLQMNSLRAEDTAVYYCARDVMVYCSSTSCYFYGMDVWGQGTTVTVSSASTKGPSVFPLAPSSKSTSGGTAALGCLVKDYFPEPVTVSWNSGALTSGVHTFPAVLQSSGLYSLSSVVTVPSSSLGTQTYICNVNHKPSNTKVDKKVEPKSCDKTHTCPPCPAPELLGGPSVFLFPPKPKDTLMISRTPEVTCVVVDVSHEDPEVKFNWYVDGVEVHNAKTKPREEQYNSTYRVVSVLTVLHQDWLNGKEYKCKVSNKALPAPIEKTISKAKGQPREPQVYTLPPSREEMTKNQVSLTCLVKGFYPSDIAVEWESNGQPENNYKTTPPVLDSDGSFFLYSKLTVDKSRWQQGNVFSCSVMHEALHNHYTQKSLSLSPGK

SEQ ID NO: 357 - protein, 108 aa, synthetic construct
  REGION 1..108: note = source = /note="Description of Artificial Sequence: Synthetic polypeptide"
DIQMTQSPSSLSASVGDRVTVTCQASQDIRDYLNWYQKKPGKAPKLLIYDASNLEAGVPSRFSGSGSGTDFTFTISGLQPEDVATYYCQQFENLPITFGQGTRLEIKR

SEQ ID NO: 358 - protein, 6 aa, synthetic construct
  REGION 1..6: note = source = /note="Description of Artificial Sequence: Synthetic peptide"
QDIRDY

SEQ ID NO: 359 - skipped

SEQ ID NO: 360 - protein, 9 aa, synthetic construct
  REGION 1..9: note = source = /note="Description of Artificial Sequence: Synthetic peptide"
QQFENLPIT

SEQ ID NO: 361 - protein, 214 aa, synthetic construct
  REGION 1..214: note = source = /note="Description of Artificial Sequence: Synthetic polypeptide"
DIQMTQSPSSLSASVGDRVTVTCQASQDIRDYLNWYQKKPGKAPKLLIYDASNLEAGVPSRFSGSGSGTDFTFTISGLQPEDVATYYCQQFENLPITFGQGTRLEIKRTVAAPSVFIFPPSDEQLKSGTASVVCLLNNFYPREAKVQWKVDNALQSGNSQESVTEQDSKDSTYSLSSTLTLSKADYEKHKVYACEVTHQGLSSPVTKSFNRGEC

SEQ ID NO: 362 - protein, 125 aa, synthetic construct
  REGION 1..125: note = source = /note="Description of Artificial Sequence: Synthetic polypeptide"
QVQLVQSGAEVKKPGASVKVSCKVSGYTLTELSMHWVRQAPGKGLEWMGGFDPEDGETIYAQKFQGRVTMTEDTSTDTAYMELSSLRSEDTAVYYCATGGYSSGFNYYYYYMDVWGKGTTVTVSS

SEQ ID NO: 363 - protein, 8 aa, synthetic construct
  REGION 1..8: note = source = /note="Description of Artificial Sequence: Synthetic peptide"
GYTLTELS

SEQ ID NO: 364 - protein, 8 aa, synthetic construct
  REGION 1..8: note = source = /note="Description of Artificial Sequence: Synthetic peptide"
FDPEDGET

SEQ ID NO: 365 - protein, 18 aa, synthetic construct
  REGION 1..18: note = source = /note="Description of Artificial Sequence: Synthetic peptide"
ATGGYSSGFNYYYYYMDV

SEQ ID NO: 366 - protein, 455 aa, synthetic construct
  REGION 1..455: note = source = /note="Description of Artificial Sequence: Synthetic polypeptide"
QVQLVQSGAEVKKPGASVKVSCKVSGYTLTELSMHWVRQAPGKGLEWMGGFDPEDGETIYAQKFQGRVTMTEDTSTDTAYMELSSLRSEDTAVYYCATGGYSSGFNYYYYYMDVWGKGTTVTVSSASTKGPSVFPLAPSSKSTSGGTAALGCLVKDYFPEPVTVSWNSGALTSGVHTFPAVLQSSGLYSLSSVVTVPSSSLGTQTYICNVNHKPSNTKVDKKVEPKSCDKTHTCPPCPAPELLGGPSVFLFPPKPKDTLMISRTPEVTCVVVDVSHEDPEVKFNWYVDGVEVHNAKTKPREEQYNSTYRVVSVLTVLHQDWLNGKEYKCKVSNKALPAPIEKTISKAKGQPREPQVYTLPPSREEMTKNQVSLTCLVKGFYPSDIAVEWESNGQPENNYKTTPPVLDSDGSFFLYSKLTVDKSRWQQGNVFSCSVMHEALHNHYTQKSLSLSPGK

SEQ ID NO: 367 - protein, 113 aa, synthetic construct; identical to SEQ ID NO: 297
  REGION 1..113: note = source = /note="Description of Artificial Sequence: Synthetic polypeptide"

SEQ ID NO: 368 - protein, 11 aa, synthetic construct
  REGION 1..11: note = source = /note="Description of Artificial Sequence: Synthetic peptide"
QSLLYRNGNNY

SEQ ID NO: 369 - skipped

SEQ ID NO: 370 - protein, 9 aa, synthetic construct
  REGION 1..9: note = source = /note="Description of Artificial Sequence: Synthetic peptide"
MQALQTPPT

SEQ ID NO: 371 - protein, 219 aa, synthetic construct; identical to SEQ ID NO: 301
  REGION 1..219: note = source = /note="Description of Artificial Sequence: Synthetic polypeptide"

SEQ ID NO: 372 - protein, 121 aa, synthetic construct
  REGION 1..121: note = source = /note="Description of Artificial Sequence: Synthetic polypeptide"
EVQLVQSGAEVKKPGASVKVSCKVSGYTLTELSMHWVRQAPGKGLEWMGGFDPEDGETIYAQKFQGRVTMTEDTSTDTAYMELSSLRSEDTAVYYCATGVTTYYYYGMDVWGQGTTVTVSS

SEQ ID NO: 373 - protein, 8 aa, synthetic construct
  REGION 1..8: note = source = /note="Description of Artificial Sequence: Synthetic peptide"
GYTLTELS

SEQ ID NO: 374 - protein, 8 aa, synthetic construct
  REGION 1..8: note = source = /note="Description of Artificial Sequence: Synthetic peptide"
FDPEDGET

SEQ ID NO: 375 - protein, 14 aa, synthetic construct
  REGION 1..14: note = source = /note="Description of Artificial Sequence: Synthetic peptide"
ATGVTTYYYYGMDV

SEQ ID NO: 376 - protein, 451 aa, synthetic construct
  REGION 1..451: note = source = /note="Description of Artificial Sequence: Synthetic polypeptide"
EVQLVQSGAEVKKPGASVKVSCKVSGYTLTELSMHWVRQAPGKGLEWMGGFDPEDGETIYAQKFQGRVTMTEDTSTDTAYMELSSLRSEDTAVYYCATGVTTYYYYGMDVWGQGTTVTVSSASTKGPSVFPLAPSSKSTSGGTAALGCLVKDYFPEPVTVSWNSGALTSGVHTFPAVLQSSGLYSLSSVVTVPSSSLGTQTYICNVNHKPSNTKVDKKVEPKSCDKTHTCPPCPAPELLGGPSVFLFPPKPKDTLMISRTPEVTCVVVDVSHEDPEVKFNWYVDGVEVHNAKTKPREEQYNSTYRVVSVLTVLHQDWLNGKEYKCKVSNKALPAPIEKTISKAKGQPREPQVYTLPPSREEMTKNQVSLTCLVKGFYPSDIAVEWESNGQPENNYKTTPPVLDSDGSFFLYSKLTVDKSRWQQGNVFSCSVMHEALHNHYTQKSLSLSPGK

SEQ ID NO: 377 - protein, 113 aa, synthetic construct
  REGION 1..113: note = source = /note="Description of Artificial Sequence: Synthetic polypeptide"
DVVMTQSPLSLPVTPGEPASISCRSSQSLLYSNGNNFLDWYLQKPGQSPRLLISLGSNRASGVPDRFSGSGSGTDFTLKISRVEAEDVGIYYCMQALQTPPTFGQGTKVEIKR

SEQ ID NO: 378 - protein, 11 aa, synthetic construct
  REGION 1..11: note = source = /note="Description of Artificial Sequence: Synthetic peptide"
QSLLYSNGNNF

SEQ ID NO: 379 - skipped

SEQ ID NO: 380 - protein, 9 aa, synthetic construct
  REGION 1..9: note = source = /note="Description of Artificial Sequence: Synthetic peptide"
MQALQTPPT

SEQ ID NO: 381 - protein, 219 aa, synthetic construct
  REGION 1..219: note = source = /note="Description of Artificial Sequence: Synthetic polypeptide"
DVVMTQSPLSLPVTPGEPASISCRSSQSLLYSNGNNFLDWYLQKPGQSPRLLISLGSNRASGVPDRFSGSGSGTDFTLKISRVEAEDVGIYYCMQALQTPPTFGQGTKVEIKRTVAAPSVFIFPPSDEQLKSGTASVVCLLNNFYPREAKVQWKVDNALQSGNSQESVTEQDSKDSTYSLSSTLTLSKADYEKHKVYACEVTHQGLSSPVTKSFNRGEC

SEQ ID NO: 382 - protein, 121 aa, synthetic construct
  REGION 1..121: note = source = /note="Description of Artificial Sequence: Synthetic polypeptide"
QITLKESGGGVVQPGGSLRLSCAASGFTFSSYGMHWVRQAPGKGLEWVAFIRYDGSNKYYADSVKGRFTISRDNSKNTLYLQMNSLRAEDTAVYYCARDLFDFWWDGMDVWGQGTTVTVSS

SEQ ID NO: 383 - protein, 8 aa, synthetic construct
  REGION 1..8: note = source = /note="Description of Artificial Sequence: Synthetic peptide"
GFTFSSYG

SEQ ID NO: 384 - protein, 8 aa, synthetic construct
  REGION 1..8: note = source = /note="Description of Artificial Sequence: Synthetic peptide"
IRYDGSNK

SEQ ID NO: 385 - protein, 14 aa, synthetic construct
  REGION 1..14: note = source = /note="Description of Artificial Sequence: Synthetic peptide"
ARDLFDFWWDGMDV

SEQ ID NO: 386 - protein, 451 aa, synthetic construct
  REGION 1..451: note = source = /note="Description of Artificial Sequence: Synthetic polypeptide"
QITLKESGGGVVQPGGSLRLSCAASGFTFSSYGMHWVRQAPGKGLEWVAFIRYDGSNKYYADSVKGRFTISRDNSKNTLYLQMNSLRAEDTAVYYCARDLFDFWWDGMDVWGQGTTVTVSSASTKGPSVFPLAPSSKSTSGGTAALGCLVKDYFPEPVTVSWNSGALTSGVHTFPAVLQSSGLYSLSSVVTVPSSSLGTQTYICNVNHKPSNTKVDKKVEPKSCDKTHTCPPCPAPELLGGPSVFLFPPKPKDTLMISRTPEVTCVVVDVSHEDPEVKFNWYVDGVEVHNAKTKPREEQYNSTYRVVSVLTVLHQDWLNGKEYKCKVSNKALPAPIEKTISKAKGQPREPQVYTLPPSREEMTKNQVSLTCLVKGFYPSDIAVEWESNGQPENNYKTTPPVLDSDGSFFLYSKLTVDKSRWQQGNVFSCSVMHEALHNHYTQKSLSLSPGK

SEQ ID NO: 387 - protein, 110 aa, synthetic construct
  REGION 1..110: note = source = /note="Description of Artificial Sequence: Synthetic polypeptide"
EIVLTQSPGTLSLSPGEKATLSCRVSQSVSSMYLAWYQQKPGQAPRLLIYGASYRATGIPDRFSGSGSGTDFNLTISRLEPEDFAVYYCQQYVSSPMYTFGLGTKLEIKR

SEQ ID NO: 388 - protein, 7 aa, synthetic construct
  REGION 1..7: note = source = /note="Description of Artificial Sequence: Synthetic peptide"
QSVSSMY

SEQ ID NO: 389 - skipped

SEQ ID NO: 390 - protein, 10 aa, synthetic construct
  REGION 1..10: note = source = /note="Description of Artificial Sequence: Synthetic peptide"
QQYVSSPMYT

SEQ ID NO: 391 - protein, 216 aa, synthetic construct
  REGION 1..216: note = source = /note="Description of Artificial Sequence: Synthetic polypeptide"
EIVLTQSPGTLSLSPGEKATLSCRVSQSVSSMYLAWYQQKPGQAPRLLIYGASYRATGIPDRFSGSGSGTDFNLTISRLEPEDFAVYYCQQYVSSPMYTFGLGTKLEIKRTVAAPSVFIFPPSDEQLKSGTASVVCLLNNFYPREAKVQWKVDNALQSGNSQESVTEQDSKDSTYSLSSTLTLSKADYEKHKVYACEVTHQGLSSPVTKSFNRGEC

SEQ ID NO: 392 - protein, 122 aa, synthetic construct
  REGION 1..122: note = source = /note="Description of Artificial Sequence: Synthetic polypeptide"
QVQLVQSGAEVKKPGSSVKVSCKASGGTFNNYGISWVRQAPGKGLEWMGQIIPLFGTTKYAQKFQGRVTIAADEPTSTAYMELGSLRSEDTAIYYCARDRMAADGMAVFDYWGQGTLVTVSS

SEQ ID NO: 393 - protein, 8 aa, synthetic construct
  REGION 1..8: note = source = /note="Description of Artificial Sequence: Synthetic peptide"
GGTFNNYG

SEQ ID NO: 394 - protein, 8 aa, synthetic construct
  REGION 1..8: note = source = /note="Description of Artificial Sequence: Synthetic peptide"
IIPLFGTT

SEQ ID NO: 395 - protein, 15 aa, synthetic construct
  REGION 1..15: note = source = /note="Description of Artificial Sequence: Synthetic peptide"
ARDRMAADGMAVFDY

SEQ ID NO: 396 - protein, 452 aa, synthetic construct
  REGION 1..452: note = source = /note="Description of Artificial Sequence: Synthetic polypeptide"
QVQLVQSGAEVKKPGSSVKVSCKASGGTFNNYGISWVRQAPGKGLEWMGQIIPLFGTTKYAQKFQGRVTIAADEPTSTAYMELGSLRSEDTAIYYCARDRMAADGMAVFDYWGQGTLVTVSSASTKGPSVFPLAPSSKSTSGGTAALGCLVKDYFPEPVTVSWNSGALTSGVHTFPAVLQSSGLYSLSSVVTVPSSSLGTQTYICNVNHKPSNTKVDKKVEPKSCDKTHTCPPCPAPELLGGPSVFLFPPKPKDTLMISRTPEVTCVVVDVSHEDPEVKFNWYVDGVEVHNAKTKPREEQYNSTYRVVSVLTVLHQDWLNGKEYKCKVSNKALPAPIEKTISKAKGQPREPQVYTLPPSREEMTKNQVSLTCLVKGFYPSDIAVEWESNGQPENNYKTTPPVLDSDGSFFLYSKLTVDKSRWQQGNVFSCSVMHEALHNHYTQKSLSLSPGK

SEQ ID NO: 397 - protein, 111 aa, synthetic construct
  REGION 1..111: note = source = /note="Description of Artificial Sequence: Synthetic polypeptide"
QSVLTQPPSVSGTPGQKVIISCSGSSSNIGRHFVFWYQQLPGTAPKLLIYKNDERPSGVPDRFSGSKSGTSASLAVSGLRSEDEADYYCSSWDAALNGVVFGGGTKLTVLG

SEQ ID NO: 398 - protein, 8 aa, synthetic construct
  REGION 1..8: note = source = /note="Description of Artificial Sequence: Synthetic peptide"
SSNIGRHF

SEQ ID NO: 399 - skipped

SEQ ID NO: 400 - protein, 11 aa, synthetic construct
  REGION 1..11: note = source = /note="Description of Artificial Sequence: Synthetic peptide"
SSWDAALNGVV

SEQ ID NO: 401 - protein, 216 aa, synthetic construct
  REGION 1..216: note = source = /note="Description of Artificial Sequence: Synthetic polypeptide"
QSVLTQPPSVSGTPGQKVIISCSGSSSNIGRHFVFWYQQLPGTAPKLLIYKNDERPSGVPDRFSGSKSGTSASLAVSGLRSEDEADYYCSSWDAALNGVVFGGGTKLTVLGQPKAAPSVTLFPPSSEELQANKATLVCLISDFYPGAVTVAWKADSSPVKAGVETTTPSKQSNNKYAASSYLSLTPEQWKSHRSYSCQVTHEGSTVEKTVAPTECS

SEQ ID NO: 402 - protein, 126 aa, synthetic construct
  REGION 1..126: note = source = /note="Description of Artificial Sequence: Synthetic polypeptide"
EVQLVQSGAEVKKPGASVKVSCKVSGYTLTELSMHWVRQAPGKGLEWMGGFDPEDGETIYAQKFQGRVTMTEDTSTDTAYMELSSLRSEDTAVYYCATEVPMVRGARRYYYYMDVWGKGTTVTVSS

SEQ ID NO: 403 - protein, 8 aa, synthetic construct
  REGION 1..8: note = source = /note="Description of Artificial Sequence: Synthetic peptide"
GYTLTELS

SEQ ID NO: 404 - protein, 8 aa, synthetic construct
  REGION 1..8: note = source = /note="Description of Artificial Sequence: Synthetic peptide"
FDPEDGET

SEQ ID NO: 405 - protein, 19 aa, synthetic construct
  REGION 1..19: note = source = /note="Description of Artificial Sequence: Synthetic peptide"
ATEVPMVRGARRYYYYMDV

SEQ ID NO: 406 - protein, 456 aa, synthetic construct
  REGION 1..456: note = source = /note="Description of Artificial Sequence: Synthetic polypeptide"
EVQLVQSGAEVKKPGASVKVSCKVSGYTLTELSMHWVRQAPGKGLEWMGGFDPEDGETIYAQKFQGRVTMTEDTSTDTAYMELSSLRSEDTAVYYCATEVPMVRGARRYYYYMDVWGKGTTVTVSSASTKGPSVFPLAPSSKSTSGGTAALGCLVKDYFPEPVTVSWNSGALTSGVHTFPAVLQSSGLYSLSSVVTVPSSSLGTQTYICNVNHKPSNTKVDKKVEPKSCDKTHTCPPCPAPELLGGPSVFLFPPKPKDTLMISRTPEVTCVVVDVSHEDPEVKFNWYVDGVEVHNAKTKPREEQYNSTYRVVSVLTVLHQDWLNGKEYKCKVSNKALPAPIEKTISKAKGQPREPQVYTLPPSREEMTKNQVSLTCLVKGFYPSDIAVEWESNGQPENNYKTTPPVLDSDGSFFLYSKLTVDKSRWQQGNVFSCSVMHEALHNHYTQKSLSLSPGK

SEQ ID NO: 407 - protein, 113 aa, synthetic construct
  REGION 1..113: note = source = /note="Description of Artificial Sequence: Synthetic polypeptide"
DVVMTQSPLFLAVTPGEPASISCRSSQTLLYINENNYLDWYVQKPGQSPQLLIYLGSTRASGVPDRFSGGGSGTDFTLTISRVEAEDVGLYYCMQGLQTPPTFGQGTRLEIKR

SEQ ID NO: 408 - protein, 11 aa, synthetic construct
  REGION 1..11: note = source = /note="Description of Artificial Sequence: Synthetic peptide"
QTLLYINENNY

SEQ ID NO: 409 - skipped

SEQ ID NO: 410 - protein, 9 aa, synthetic construct
  REGION 1..9: note = source = /note="Description of Artificial Sequence: Synthetic peptide"
MQGLQTPPT

SEQ ID NO: 411 - protein, 219 aa, synthetic construct
  REGION 1..219: note = source = /note="Description of Artificial Sequence: Synthetic polypeptide"
DVVMTQSPLFLAVTPGEPASISCRSSQTLLYINENNYLDWYVQKPGQSPQLLIYLGSTRASGVPDRFSGGGSGTDFTLTISRVEAEDVGLYYCMQGLQTPPTFGQGTRLEIKRTVAAPSVFIFPPSDEQLKSGTASVVCLLNNFYPREAKVQWKVDNALQSGNSQESVTEQDSKDSTYSLSSTLTLSKADYEKHKVYACEVTHQGLSSPVTKSFNRGEC

SEQ ID NO: 412 - protein, 123 aa, synthetic construct
  REGION 1..123: note = source = /note="Description of Artificial Sequence: Synthetic polypeptide"
QVQLQESGPGLVKSSETLSLTCSVSGGSISNSNYYWGWIRQPPGKGLEWIGGIYYSGSTYYNPSLESRVTISEDTSKNQISLKLSSVTAADTAVYYCARGAWELSLGDWFDPWGPGTLVTVSS

SEQ ID NO: 413 - protein, 10 aa, synthetic construct
  REGION 1..10: note = source = /note="Description of Artificial Sequence: Synthetic peptide"
GGSISNSNYY

SEQ ID NO: 414 - protein, 7 aa, synthetic construct
  REGION 1..7: note = source = /note="Description of Artificial Sequence: Synthetic peptide"
IYYSGST

SEQ ID NO: 415 - protein, 15 aa, synthetic construct
  REGION 1..15: note = source = /note="Description of Artificial Sequence: Synthetic peptide"
ARGAWELSLGDWFDP

SEQ ID NO: 416 - protein, 453 aa, synthetic construct
  REGION 1..453: note = source = /note="Description of Artificial Sequence: Synthetic polypeptide"
QVQLQESGPGLVKSSETLSLTCSVSGGSISNSNYYWGWIRQPPGKGLEWIGGIYYSGSTYYNPSLESRVTISEDTSKNQISLKLSSVTAADTAVYYCARGAWELSLGDWFDPWGPGTLVTVSSASTKGPSVFPLAPSSKSTSGGTAALGCLVKDYFPEPVTVSWNSGALTSGVHTFPAVLQSSGLYSLSSVVTVPSSSLGTQTYICNVNHKPSNTKVDKKVEPKSCDKTHTCPPCPAPELLGGPSVFLFPPKPKDTLMISRTPEVTCVVVDVSHEDPEVKFNWYVDGVEVHNAKTKPREEQYNSTYRVVSVLTVLHQDWLNGKEYKCKVSNKALPAPIEKTISKAKGQPREPQVYTLPPSREEMTKNQVSLTCLVKGFYPSDIAVEWESNGQPENNYKTTPPVLDSDGSFFLYSKLTVDKSRWQQGNVFSCSVMHEALHNHYTQKSLSLSPGK

SEQ ID NO: 417 - protein, 113 aa, synthetic construct
  REGION 1..113: note = source = /note="Description of Artificial Sequence: Synthetic polypeptide"
QSVLTQPPSVSGAPGQRVTISCTGSSSNIGAGYDIQWYQQLPGTAPKLLIYGNNNRPSGVPDRFSGSRSGTSASLAITGLQAEDEADYYCQSYDSSLSVYVVFGGGTQLTVLG

SEQ ID NO: 418 - protein, 9 aa, synthetic construct
  REGION 1..9: note = source = /note="Description of Artificial Sequence: Synthetic peptide"
SSNIGAGYD

SEQ ID NO: 419 - skipped

SEQ ID NO: 420 - protein, 12 aa, synthetic construct
  REGION 1..12: note = source = /note="Description of Artificial Sequence: Synthetic peptide"
QSYDSSLSVYVV

SEQ ID NO: 421 - protein, 218 aa, synthetic construct
  REGION 1..218: note = source = /note="Description of Artificial Sequence: Synthetic polypeptide"
QSVLTQPPSVSGAPGQRVTISCTGSSSNIGAGYDIQWYQQLPGTAPKLLIYGNNNRPSGVPDRFSGSRSGTSASLAITGLQAEDEADYYCQSYDSSLSVYVVFGGGTQLTVLGQPKAAPSVTLFPPSSEELQANKATLVCLISDFYPGAVTVAWKADSSPVKAGVETTTPSKQSNNKYAASSYLSLTPEQWKSHRSYSCQVTHEGSTVEKTVAPTECS

SEQ ID NO: 422 - protein, 122 aa, synthetic construct
  REGION 1..122: note = source = /note="Description of Artificial Sequence: Synthetic polypeptide"
EVQLVESGGGVVKPGGSLRLSCAASGFTFGTSSMNWVRQAPGKGLEWVAVISFDGTEIHYADSVKGRFTISRDNSKSTVFLQMNSLRPDDTALYYCAKGSGNIYFYSGMDVWGQGTTVTVSS

SEQ ID NO: 423 - protein, 8 aa, synthetic construct
  REGION 1..8: note = source = /note="Description of Artificial Sequence: Synthetic peptide"
GFTFGTSS

SEQ ID NO: 424 - protein, 8 aa, synthetic construct
  REGION 1..8: note = source = /note="Description of Artificial Sequence: Synthetic peptide"
ISFDGTEI

SEQ ID NO: 425 - protein, 15 aa, synthetic construct
  REGION 1..15: note = source = /note="Description of Artificial Sequence: Synthetic peptide"
AKGSGNIYFYSGMDV

SEQ ID NO: 426 - protein, 452 aa, synthetic construct
  REGION 1..452: note = source = /note="Description of Artificial Sequence: Synthetic polypeptide"
EVQLVESGGGVVKPGGSLRLSCAASGFTFGTSSMNWVRQAPGKGLEWVAVISFDGTEIHYADSVKGRFTISRDNSKSTVFLQMNSLRPDDTALYYCAKGSGNIYFYSGMDVWGQGTTVTVSSASTKGPSVFPLAPSSKSTSGGTAALGCLVKDYFPEPVTVSWNSGALTSGVHTFPAVLQSSGLYSLSSVVTVPSSSLGTQTYICNVNHKPSNTKVDKKVEPKSCDKTHTCPPCPAPELLGGPSVFLFPPKPKDTLMISRTPEVTCVVVDVSHEDPEVKFNWYVDGVEVHNAKTKPREEQYNSTYRVVSVLTVLHQDWLNGKEYKCKVSNKALPAPIEKTISKAKGQPREPQVYTLPPSREEMTKNQVSLTCLVKGFYPSDIAVEWESNGQPENNYKTTPPVLDSDGSFFLYSKLTVDKSRWQQGNVFSCSVMHEALHNHYTQKSLSLSPGK

SEQ ID NO: 427 - protein, 108 aa, synthetic construct
  REGION 1..108: note = source = /note="Description of Artificial Sequence: Synthetic polypeptide"
DIQMTQSPSTLSASVGDRVTITCRAGQSISGWLAWFQQKPGKAPNLLIYETSTLESGVPSRFSGSGSGTEYTLTISSLQPDDFATYYCQQYYSYPLTFGQGTKVEIKR

SEQ ID NO: 428 - protein, 6 aa, synthetic construct
  REGION 1..6: note = source = /note="Description of Artificial Sequence: Synthetic peptide"
QSISGW

SEQ ID NO: 429 - skipped

SEQ ID NO: 430 - protein, 9 aa, synthetic construct
  REGION 1..9: note = source = /note="Description of Artificial Sequence: Synthetic peptide"
QQYYSYPLT

SEQ ID NO: 431 - protein, 214 aa, synthetic construct
  REGION 1..214: note = source = /note="Description of Artificial Sequence: Synthetic polypeptide"
DIQMTQSPSTLSASVGDRVTITCRAGQSISGWLAWFQQKPGKAPNLLIYETSTLESGVPSRFSGSGSGTEYTLTISSLQPDDFATYYCQQYYSYPLTFGQGTKVEIKRTVAAPSVFIFPPSDEQLKSGTASVVCLLNNFYPREAKVQWKVDNALQSGNSQESVTEQDSKDSTYSLSSTLTLSKADYEKHKVYACEVTHQGLSSPVTKSFNRGEC

SEQ ID NO: 432 - protein, 126 aa, synthetic construct
  REGION 1..126: note = source = /note="Description of Artificial Sequence: Synthetic polypeptide"
EVQLVQSGAEVKKPGASVKVSCKVSGYTLTELSMHWVRQAPGKGLEWMGGFDPEDGETIYAQKFQGRVTMTEDTSTDTAYMELSSLRSEDTAVYYCATGVPAAIGVYYYYYYMDVWGKGTTVTVSS

SEQ ID NO: 433 - protein, 8 aa, synthetic construct
  REGION 1..8: note = source = /note="Description of Artificial Sequence: Synthetic peptide"
GYTLTELS

SEQ ID NO: 434 - protein, 8 aa, synthetic construct
  REGION 1..8: note = source = /note="Description of Artificial Sequence: Synthetic peptide"
FDPEDGET

SEQ ID NO: 435 - protein, 19 aa, synthetic construct
  REGION 1..19: note = source = /note="Description of Artificial Sequence: Synthetic peptide"
ATGVPAAIGVYYYYYYMDV

SEQ ID NO: 436 - protein, 456 aa, synthetic construct
  REGION 1..456: note = source = /note="Description of Artificial Sequence: Synthetic polypeptide"
EVQLVQSGAEVKKPGASVKVSCKVSGYTLTELSMHWVRQAPGKGLEWMGGFDPEDGETIYAQKFQGRVTMTEDTSTDTAYMELSSLRSEDTAVYYCATGVPAAIGVYYYYYYMDVWGKGTTVTVSSASTKGPSVFPLAPSSKSTSGGTAALGCLVKDYFPEPVTVSWNSGALTSGVHTFPAVLQSSGLYSLSSVVTVPSSSLGTQTYICNVNHKPSNTKVDKKVEPKSCDKTHTCPPCPAPELLGGPSVFLFPPKPKDTLMISRTPEVTCVVVDVSHEDPEVKFNWYVDGVEVHNAKTKPREEQYNSTYRVVSVLTVLHQDWLNGKEYKCKVSNKALPAPIEKTISKAKGQPREPQVYTLPPSREEMTKNQVSLTCLVKGFYPSDIAVEWESNGQPENNYKTTPPVLDSDGSFFLYSKLTVDKSRWQQGNVFSCSVMHEALHNHYTQKSLSLSPGK

SEQ ID NO: 437 - protein, 113 aa, synthetic construct
  REGION 1..113: note = source = /note="Description of Artificial Sequence: Synthetic polypeptide"
DVVMTQSPLSLPVTPGEPASISCRSSQSLLYSNGYNYLDWYLQKPGQSPQLLISLGSNRASGVPDRFSGSGSGTDFTLKISRVEAEDVGVYYCMQALQSPVTFGGGTKVEIKR

SEQ ID NO: 438 - protein, 11 aa, synthetic construct
  REGION 1..11: note = source = /note="Description of Artificial Sequence: Synthetic peptide"
QSLLYSNGYNY

SEQ ID NO: 439 - skipped

SEQ ID NO: 440 - protein, 9 aa, synthetic construct
  REGION 1..9: note = source = /note="Description of Artificial Sequence: Synthetic peptide"
MQALQSPVT

SEQ ID NO: 441 - protein, 219 aa, synthetic construct
  REGION 1..219: note = source = /note="Description of Artificial Sequence: Synthetic polypeptide"
DVVMTQSPLSLPVTPGEPASISCRSSQSLLYSNGYNYLDWYLQKPGQSPQLLISLGSNRASGVPDRFSGSGSGTDFTLKISRVEAEDVGVYYCMQALQSPVTFGGGTKVEIKRTVAAPSVFIFPPSDEQLKSGTASVVCLLNNFYPREAKVQWKVDNALQSGNSQESVTEQDSKDSTYSLSSTLTLSKADYEKHKVYACEVTHQGLSSPVTKSFNRGEC

SEQ ID NO: 442 - protein, 127 aa, synthetic construct
  REGION 1..127: note = source = /note="Description of Artificial Sequence: Synthetic polypeptide"
EVQLVQSGAEVKKPGASVKVSCKVSGYTLTELSMHWVRQAPGKGLEWMGGFDPEDGETIYAQKFQGRVTMTEDTSTDTAYMELSSLRSEDTAVYYCATDSRDGPAARGGYYYYMDVWGQGTTVTVSS

SEQ ID NO: 443 - protein, 8 aa, synthetic construct
  REGION 1..8: note = source = /note="Description of Artificial Sequence: Synthetic peptide"
GYTLTELS

SEQ ID NO: 444 - protein, 8 aa, synthetic construct
  REGION 1..8: note = source = /note="Description of Artificial Sequence: Synthetic peptide"
FDPEDGET

SEQ ID NO: 445 - protein, 20 aa, synthetic construct
  REGION 1..20: note = source = /note="Description of Artificial Sequence: Synthetic peptide"
ATDSRDGPAARGGYYYYMDV

SEQ ID NO: 446 - protein, 457 aa, synthetic construct
  REGION 1..457: note = source = /note="Description of Artificial Sequence: Synthetic polypeptide"
EVQLVQSGAEVKKPGASVKVSCKVSGYTLTELSMHWVRQAPGKGLEWMGGFDPEDGETIYAQKFQGRVTMTEDTSTDTAYMELSSLRSEDTAVYYCATDSRDGPAARGGYYYYMDVWGQGTTVTVSSASTKGPSVFPLAPSSKSTSGGTAALGCLVKDYFPEPVTVSWNSGALTSGVHTFPAVLQSSGLYSLSSVVTVPSSSLGTQTYICNVNHKPSNTKVDKKVEPKSCDKTHTCPPCPAPELLGGPSVFLFPPKPKDTLMISRTPEVTCVVVDVSHEDPEVKFNWYVDGVEVHNAKTKPREEQYNSTYRVVSVLTVLHQDWLNGKEYKCKVSNKALPAPIEKTISKAKGQPREPQVYTLPPSREEMTKNQVSLTCLVKGFYPSDIAVEWESNGQPENNYKTTPPVLDSDGSFFLYSKLTVDKSRWQQGNVFSCSVMHEALHNHYTQKSLSLSPGK

SEQ ID NO: 447 - protein, 113 aa, synthetic construct
  REGION 1..113: note = source = /note="Description of Artificial Sequence: Synthetic polypeptide"
DVVMTQSPLSLPVTLGQPASISCRSSQSLLYINGYNYLDWYLQKPGQSPQLLIYLGSNRASGVPDRFSGSGSGTDFTLKISRVEAEDVGVYYCMQALQTPPTFGQGTKVEIKR

SEQ ID NO: 448 - protein, 11 aa, synthetic construct
  REGION 1..11: note = source = /note="Description of Artificial Sequence: Synthetic peptide"
QSLLYINGYNY

SEQ ID NO: 449 - skipped

SEQ ID NO: 450 - protein, 9 aa, synthetic construct
  REGION 1..9: note = source = /note="Description of Artificial Sequence: Synthetic peptide"
MQALQTPPT

SEQ ID NO: 451 - protein, 219 aa, synthetic construct
  REGION 1..219: note = source = /note="Description of Artificial Sequence: Synthetic polypeptide"
DVVMTQSPLSLPVTLGQPASISCRSSQSLLYINGYNYLDWYLQKPGQSPQLLIYLGSNRASGVPDRFSGSGSGTDFTLKISRVEAEDVGVYYCMQALQTPPTFGQGTKVEIKRTVAAPSVFIFPPSDEQLKSGTASVVCLLNNFYPREAKVQWKVDNALQSGNSQESVTEQDSKDSTYSLSSTLTLSKADYEKHKVYACEVTHQGLSSPVTKSFNRGEC

SEQ ID NO: 452 - protein, 127 aa, synthetic construct
  REGION 1..127: note = source = /note="Description of Artificial Sequence: Synthetic polypeptide"
EVQLVQSGAEVKKPGSSVKVSCKASGGTFSSYAISWVRQAPGQGLEWMGGIIPIFGTANYAQKFQGRVTITADESTSTAYMELSSLRSEDTAVYYCARDAYYYDSSGYYNPDAFDIWGQGTMVTVSS

SEQ ID NO: 453 - protein, 8 aa, synthetic construct
  REGION 1..8: note = source = /note="Description of Artificial Sequence: Synthetic peptide"
GGTFSSYA

SEQ ID NO: 454 - protein, 8 aa, synthetic construct
  REGION 1..8: note = source = /note="Description of Artificial Sequence: Synthetic peptide"
IIPIFGTA

SEQ ID NO: 455 - protein, 20 aa, synthetic construct
  REGION 1..20: note = source = /note="Description of Artificial Sequence: Synthetic peptide"
ARDAYYYDSSGYYNPDAFDI

SEQ ID NO: 456 - protein, 457 aa, synthetic construct
  REGION 1..457: note = source = /note="Description of Artificial Sequence: Synthetic polypeptide"
EVQLVQSGAEVKKPGSSVKVSCKASGGTFSSYAISWVRQAPGQGLEWMGGIIPIFGTANYAQKFQGRVTITADESTSTAYMELSSLRSEDTAVYYCARDAYYYDSSGYYNPDAFDIWGQGTMVTVSSASTKGPSVFPLAPSSKSTSGGTAALGCLVKDYFPEPVTVSWNSGALTSGVHTFPAVLQSSGLYSLSSVVTVPSSSLGTQTYICNVNHKPSNTKVDKKVEPKSCDKTHTCPPCPAPELLGGPSVFLFPPKPKDTLMISRTPEVTCVVVDVSHEDPEVKFNWYVDGVEVHNAKTKPREEQYNSTYRVVSVLTVLHQDWLNGKEYKCKVSNKALPAPIEKTISKAKGQPREPQVYTLPPSREEMTKNQVSLTCLVKGFYPSDIAVEWESNGQPENNYKTTPPVLDSDGSFFLYSKLTVDKSRWQQGNVFSCSVMHEALHNHYTQKSLSLSPGK

SEQ ID NO: 457 - protein, 113 aa, synthetic construct
  REGION 1..113: note = source = /note="Description of Artificial Sequence: Synthetic polypeptide"
DVVMTQSPLSLPVTPGEPASISCRSSQSLLHSNGYNYLDWYLQKPGQSPQLLIYLGSSRASGVPDRFSGSVSGTDFTLKISRVEAEDVGVYYCMQGLQTPRTFGRGTKLEIKR

SEQ ID NO: 458 - protein, 11 aa, synthetic construct
  REGION 1..11: note = source = /note="Description of Artificial Sequence: Synthetic peptide"
QSLLHSNGYNY

SEQ ID NO: 459 - skipped

SEQ ID NO: 460 - protein, 9 aa, synthetic construct
  REGION 1..9: note = source = /note="Description of Artificial Sequence: Synthetic peptide"
MQGLQTPRT

SEQ ID NO: 461 - protein, 219 aa, synthetic construct
  REGION 1..219: note = source = /note="Description of Artificial Sequence: Synthetic polypeptide"
DVVMTQSPLSLPVTPGEPASISCRSSQSLLHSNGYNYLDWYLQKPGQSPQLLIYLGSSRASGVPDRFSGSVSGTDFTLKISRVEAEDVGVYYCMQGLQTPRTFGRGTKLEIKRTVAAPSVFIFPPSDEQLKSGTASVVCLLNNFYPREAKVQWKVDNALQSGNSQESVTEQDSKDSTYSLSSTLTLSKADYEKHKVYACEVTHQGLSSPVTKSFNRGEC

SEQ ID NO: 462 - protein, 129 aa, synthetic construct
  REGION 1..129: note = source = /note="Description of Artificial Sequence: Synthetic polypeptide"
QVQLVQSGAEVKKPGSSVKVSCKASGGTFSSSAISWVRQAPGQGFEWMGGIIPIYGITDYAQKFQGRVTITTDESTSTAYMELSSLTSEDTAVYYCARDDTARRVRGVPYYYYYAMDVWGQGTTVTVSS

SEQ ID NO: 463 - protein, 8 aa, synthetic construct
  REGION 1..8: note = source = /note="Description of Artificial Sequence: Synthetic peptide"
GGTFSSSA

SEQ ID NO: 464 - protein, 8 aa, synthetic construct
  REGION 1..8: note = source = /note="Description of Artificial Sequence: Synthetic peptide"
IIPIYGIT

SEQ ID NO: 465 - protein, 22 aa, synthetic construct
  REGION 1..22: note = source = /note="Description of Artificial Sequence: Synthetic peptide"
ARDDTARRVRGVPYYYYYAMDV

SEQ ID NO: 466 - protein, 459 aa, synthetic construct
  REGION 1..459: note = source = /note="Description of Artificial Sequence: Synthetic polypeptide"
QVQLVQSGAEVKKPGSSVKVSCKASGGTFSSSAISWVRQAPGQGFEWMGGIIPIYGITDYAQKFQGRVTITTDESTSTAYMELSSLTSEDTAVYYCARDDTARRVRGVPYYYYYAMDVWGQGTTVTVSSASTKGPSVFPLAPSSKSTSGGTAALGCLVKDYFPEPVTVSWNSGALTSGVHTFPAVLQSSGLYSLSSVVTVPSSSLGTQTYICNVNHKPSNTKVDKKVEPKSCDKTHTCPPCPAPELLGGPSVFLFPPKPKDTLMISRTPEVTCVVVDVSHEDPEVKFNWYVDGVEVHNAKTKPREEQYNSTYRVVSVLTVLHQDWLNGKEYKCKVSNKALPAPIEKTISKAKGQPREPQVYTLPPSREEMTKNQVSLTCLVKGFYPSDIAVEWESNGQPENNYKTTPPVLDSDGSFFLYSKLTVDKSRWQQGNVFSCSVMHEALHNHYTQKSLSLSPGK

SEQ ID NO: 467 - protein, 108 aa, synthetic construct
  REGION 1..108: note = source = /note="Description of Artificial Sequence: Synthetic polypeptide"
ETTLTQSPAFMSATPGDEVNISCKASQDIDDDVSWYQQKPGGAPIFLIQEASTLVPGIPPRFSGSGFGTDFTLTIKNMESEDAAYYFCLQHDNLPLTFGGGTKVDIKR

SEQ ID NO: 468 - protein, 6 aa, synthetic construct
  REGION 1..6: note = source = /note="Description of Artificial Sequence: Synthetic peptide"
QDIDDD

SEQ ID NO: 469 - skipped

SEQ ID NO: 470 - protein, 9 aa, synthetic construct
  REGION 1..9: note = source = /note="Description of Artificial Sequence: Synthetic peptide"
LQHDNLPLT

SEQ ID NO: 471 - protein, 214 aa, synthetic construct
  REGION 1..214: note = source = /note="Description of Artificial Sequence: Synthetic polypeptide"
ETTLTQSPAFMSATPGDEVNISCKASQDIDDDVSWYQQKPGGAPIFLIQEASTLVPGIPPRFSGSGFGTDFTLTIKNMESEDAAYYFCLQHDNLPLTFGGGTKVDIKRTVAAPSVFIFPPSDEQLKSGTASVVCLLNNFYPREAKVQWKVDNALQSGNSQESVTEQDSKDSTYSLSSTLTLSKADYEKHKVYACEVTHQGLSSPVTKSFNRGEC

SEQ ID NO: 472 - protein, 126 aa, synthetic construct
  REGION 1..126: note = source = /note="Description of Artificial Sequence: Synthetic polypeptide"
EVQLVQSGAEVKKPGASVKVSCKVSGYTLTELSMHWVRQAPGKGLEWMGGFDPEDGETIYAQKFQGRVTMTEDTSTDTAYMELSSLRSEDTAVYYCATEDPGPVAGPYYYYGMDVWGQGTTVTVSS

SEQ ID NO: 473 - protein, 8 aa, synthetic construct
  REGION 1..8: note = source = /note="Description of Artificial Sequence: Synthetic peptide"
GYTLTELS

SEQ ID NO: 474 - protein, 8 aa, synthetic construct
  REGION 1..8: note = source = /note="Description of Artificial Sequence: Synthetic peptide"
FDPEDGET

SEQ ID NO: 475 - protein, 19 aa, synthetic construct
  REGION 1..19: note = source = /note="Description of Artificial Sequence: Synthetic peptide"
ATEDPGPVAGPYYYYGMDV

SEQ ID NO: 476 - protein, 456 aa, synthetic construct
  REGION 1..456: note = source = /note="Description of Artificial Sequence: Synthetic polypeptide"
EVQLVQSGAEVKKPGASVKVSCKVSGYTLTELSMHWVRQAPGKGLEWMGGFDPEDGETIYAQKFQGRVTMTEDTSTDTAYMELSSLRSEDTAVYYCATEDPGPVAGPYYYYGMDVWGQGTTVTVSSASTKGPSVFPLAPSSKSTSGGTAALGCLVKDYFPEPVTVSWNSGALTSGVHTFPAVLQSSGLYSLSSVVTVPSSSLGTQTYICNVNHKPSNTKVDKKVEPKSCDKTHTCPPCPAPELLGGPSVFLFPPKPKDTLMISRTPEVTCVVVDVSHEDPEVKFNWYVDGVEVHNAKTKPREEQYNSTYRVVSVLTVLHQDWLNGKEYKCKVSNKALPAPIEKTISKAKGQPREPQVYTLPPSREEMTKNQVSLTCLVKGFYPSDIAVEWESNGQPENNYKTTPPVLDSDGSFFLYSKLTVDKSRWQQGNVFSCSVMHEALHNHYTQKSLSLSPGK

SEQ ID NO: 477 - protein, 113 aa, synthetic construct
  REGION 1..113: note = source = /note="Description of Artificial Sequence: Synthetic polypeptide"
DVVMTQSPLVLPVTPGEPASISCRSSQSLLYINGYHYLDWYVQRPGQSPQLLIFLGSTRASGVPDRFSGSGSGTDFTLEISKVEAEDVGIYFCMQALQTPPTFGGGTKVEIKR

SEQ ID NO: 478 - protein, 11 aa, synthetic construct
  REGION 1..11: note = source = /note="Description of Artificial Sequence: Synthetic peptide"
QSLLYINGYHY

SEQ ID NO: 479 - skipped

SEQ ID NO: 480 - protein, 9 aa, synthetic construct
  REGION 1..9: note = source = /note="Description of Artificial Sequence: Synthetic peptide"
MQALQTPPT

SEQ ID NO: 481 - protein, 219 aa, synthetic construct
  REGION 1..219: note = source = /note="Description of Artificial Sequence: Synthetic polypeptide"
DVVMTQSPLVLPVTPGEPASISCRSSQSLLYINGYHYLDWYVQRPGQSPQLLIFLGSTRASGVPDRFSGSGSGTDFTLEISKVEAEDVGIYFCMQALQTPPTFGGGTKVEIKRTVAAPSVFIFPPSDEQLKSGTASVVCLLNNFYPREAKVQWKVDNALQSGNSQESVTEQDSKDSTYSLSSTLTLSKADYEKHKVYACEVTHQGLSSPVTKSFNRGEC

SEQ ID NO: 482 - protein, 129 aa, synthetic construct; identical to SEQ ID NO: 462
  REGION 1..129: note = source = /note="Description of Artificial Sequence: Synthetic polypeptide"

SEQ ID NO: 483 - protein, 8 aa, synthetic construct
  REGION 1..8: note = source = /note="Description of Artificial Sequence: Synthetic peptide"
GGTFSSSA

SEQ ID NO: 484 - protein, 8 aa, synthetic construct
  REGION 1..8: note = source = /note="Description of Artificial Sequence: Synthetic peptide"
IIPIYGIT

SEQ ID NO: 485 - protein, 22 aa, synthetic construct
  REGION 1..22: note = source = /note="Description of Artificial Sequence: Synthetic peptide"
ARDDTARRVRGVPYYYYYAMDV

SEQ ID NO: 486 - protein, 459 aa, synthetic construct; identical to SEQ ID NO: 466
  REGION 1..459: note = source = /note="Description of Artificial Sequence: Synthetic polypeptide"

SEQ ID NO: 487 - protein, 114 aa, synthetic construct
  REGION 1..114: note = source = /note="Description of Artificial Sequence: Synthetic polypeptide"
DIVMTQTPLSLPVTPGEPASISCRPSQSLLDSDDGNTYLDWYLQKPGQSPQLLIHTLSYRASGVPDRFSGSGSGTDFTLKISRVEAEDVGVYYCMQRLQFPLTFGGGTKVEIKR

SEQ ID NO: 488 - protein, 12 aa, synthetic construct
  REGION 1..12: note = source = /note="Description of Artificial Sequence: Synthetic peptide"
QSLLDSDDGNTY

SEQ ID NO: 489 - skipped

SEQ ID NO: 490 - protein, 9 aa, synthetic construct
  REGION 1..9: note = source = /note="Description of Artificial Sequence: Synthetic peptide"
MQRLQFPLT

SEQ ID NO: 491 - protein, 220 aa, synthetic construct
  REGION 1..220: note = source = /note="Description of Artificial Sequence: Synthetic polypeptide"
DIVMTQTPLSLPVTPGEPASISCRPSQSLLDSDDGNTYLDWYLQKPGQSPQLLIHTLSYRASGVPDRFSGSGSGTDFTLKISRVEAEDVGVYYCMQRLQFPLTFGGGTKVEIKRTVAAPSVFIFPPSDEQLKSGTASVVCLLNNFYPREAKVQWKVDNALQSGNSQESVTEQDSKDSTYSLSSTLTLSKADYEKHKVYACEVTHQGLSSPVTKSFNRGEC

SEQ ID NO: 492 - protein, 126 aa, synthetic construct; identical to SEQ ID NO: 432
  REGION 1..126: note = source = /note="Description of Artificial Sequence: Synthetic polypeptide"

SEQ ID NO: 493 - protein, 8 aa, synthetic construct
  REGION 1..8: note = source = /note="Description of Artificial Sequence: Synthetic peptide"
GYTLTELS

SEQ ID NO: 494 - protein, 8 aa, synthetic construct
  REGION 1..8: note = source = /note="Description of Artificial Sequence: Synthetic peptide"
FDPEDGET

SEQ ID NO: 495 - protein, 19 aa, synthetic construct
  REGION 1..19: note = source = /note="Description of Artificial Sequence: Synthetic peptide"
ATGVPAAIGVYYYYYYMDV

SEQ ID NO: 496 - protein, 456 aa, synthetic construct; identical to SEQ ID NO: 436
  REGION 1..456: note = source = /note="Description of Artificial Sequence: Synthetic polypeptide"

SEQ ID NO: 497 - protein, 113 aa, synthetic construct
  REGION 1..113: note = source = /note="Description of Artificial Sequence: Synthetic polypeptide"
DVVMTQSPLSLPVTPGEPASISCRSSQSLLYRNGYNYLDWYLQKPGQSPQLLIYWGSYRASGVPDRFSGSGSGTDFTLKISRVEAEDVGVYYCMQAVQNPPTFGQGTKVDIKR

SEQ ID NO: 498 - protein, 11 aa, synthetic construct
  REGION 1..11: note = source = /note="Description of Artificial Sequence: Synthetic peptide"
QSLLYRNGYNY

SEQ ID NO: 499 - skipped

SEQ ID NO: 500 - protein, 9 aa, synthetic construct
  REGION 1..9: note = source = /note="Description of Artificial Sequence: Synthetic peptide"
MQAVQNPPT

SEQ ID NO: 501 - protein, 219 aa, synthetic construct
  REGION 1..219: note = source = /note="Description of Artificial Sequence: Synthetic polypeptide"
DVVMTQSPLSLPVTPGEPASISCRSSQSLLYRNGYNYLDWYLQKPGQSPQLLIYWGSYRASGVPDRFSGSGSGTDFTLKISRVEAEDVGVYYCMQAVQNPPTFGQGTKVDIKRTVAAPSVFIFPPSDEQLKSGTASVVCLLNNFYPREAKVQWKVDNALQSGNSQESVTEQDSKDSTYSLSSTLTLSKADYEKHKVYACEVTHQGLSSPVTKSFNRGEC

SEQ ID NO: 502 - protein, 129 aa, synthetic construct; identical to SEQ ID NO: 462
  REGION 1..129: note = source = /note="Description of Artificial Sequence: Synthetic polypeptide"

SEQ ID NO: 503 - protein, 8 aa, synthetic construct
  REGION 1..8: note = source = /note="Description of Artificial Sequence: Synthetic peptide"
GGTFSSSA

SEQ ID NO: 504 - protein, 8 aa, synthetic construct
  REGION 1..8: note = source = /note="Description of Artificial Sequence: Synthetic peptide"
IIPIYGIT

SEQ ID NO: 505 - protein, 22 aa, synthetic construct
  REGION 1..22: note = source = /note="Description of Artificial Sequence: Synthetic peptide"
ARDDTARRVRGVPYYYYYAMDV

SEQ ID NO: 506 - protein, 459 aa, synthetic construct; identical to SEQ ID NO: 466
  REGION 1..459: note = source = /note="Description of Artificial Sequence: Synthetic polypeptide"

SEQ ID NO: 507 - protein, 109 aa, synthetic construct
  REGION 1..109: note = source = /note="Description of Artificial Sequence: Synthetic polypeptide"
DVVMTQSPAFLSVTPGERVTLSCKASQTMNNYLAWYQQKPGQAPRLLIYDASTRATDTPPRFSGSGSGTEFTLTISSVQSEDFALYYCQQYGDWLPITFGQGTRLEIKR

SEQ ID NO: 508 - protein, 6 aa, synthetic construct
  REGION 1..6: note = source = /note="Description of Artificial Sequence: Synthetic peptide"
QTMNNY

SEQ ID NO: 509 - skipped

SEQ ID NO: 510 - protein, 10 aa, synthetic construct
  REGION 1..10: note = source = /note="Description of Artificial Sequence: Synthetic peptide"
QQYGDWLPIT

SEQ ID NO: 511 - protein, 215 aa, synthetic construct
  REGION 1..215: note = source = /note="Description of Artificial Sequence: Synthetic polypeptide"
DVVMTQSPAFLSVTPGERVTLSCKASQTMNNYLAWYQQKPGQAPRLLIYDASTRATDTPPRFSGSGSGTEFTLTISSVQSEDFALYYCQQYGDWLPITFGQGTRLEIKRTVAAPSVFIFPPSDEQLKSGTASVVCLLNNFYPREAKVQWKVDNALQSGNSQESVTEQDSKDSTYSLSSTLTLSKADYEKHKVYACEVTHQGLSSPVTKSFNRGEC

SEQ ID NO: 512 - protein, 124 aa, synthetic construct
  REGION 1..124: note = source = /note="Description of Artificial Sequence: Synthetic polypeptide"
EVQLVQSGAEVKKPGASVKVSCKVSGYTLTELSMHWVRQAPGKGLEWMGGFDPEDGETIYAQKFQGRVTMTEDTSTDTAYMELSSLRSEDTAVYYCATAFPEATISYYYYMDVWGKGTTVTVSS

SEQ ID NO: 513 - protein, 8 aa, synthetic construct
  REGION 1..8: note = source = /note="Description of Artificial Sequence: Synthetic peptide"
GYTLTELS

SEQ ID NO: 514 - protein, 8 aa, synthetic construct
  REGION 1..8: note = source = /note="Description of Artificial Sequence: Synthetic peptide"
FDPEDGET

SEQ ID NO: 515 - protein, 17 aa, synthetic construct
  REGION 1..17: note = source = /note="Description of Artificial Sequence: Synthetic peptide"
ATAFPEATISYYYYMDV

SEQ ID NO: 516 - protein, 454 aa, synthetic construct
  REGION 1..454: note = source = /note="Description of Artificial Sequence: Synthetic polypeptide"
EVQLVQSGAEVKKPGASVKVSCKVSGYTLTELSMHWVRQAPGKGLEWMGGFDPEDGETIYAQKFQGRVTMTEDTSTDTAYMELSSLRSEDTAVYYCATAFPEATISYYYYMDVWGKGTTVTVSSASTKGPSVFPLAPSSKSTSGGTAALGCLVKDYFPEPVTVSWNSGALTSGVHTFPAVLQSSGLYSLSSVVTVPSSSLGTQTYICNVNHKPSNTKVDKKVEPKSCDKTHTCPPCPAPELLGGPSVFLFPPKPKDTLMISRTPEVTCVVVDVSHEDPEVKFNWYVDGVEVHNAKTKPREEQYNSTYRVVSVLTVLHQDWLNGKEYKCKVSNKALPAPIEKTISKAKGQPREPQVYTLPPSREEMTKNQVSLTCLVKGFYPSDIAVEWESNGQPENNYKTTPPVLDSDGSFFLYSKLTVDKSRWQQGNVFSCSVMHEALHNHYTQKSLSLSPGK

SEQ ID NO: 517 - protein, 113 aa, synthetic construct
  REGION 1..113: note = source = /note="Description of Artificial Sequence: Synthetic polypeptide"
DVVMTQSPLSLPVTPGEPASISCRSSQSLLYRNGYNYLDWYLQKPGQSPQLLIYWGSYRASGVPDRFSGSGSGTDFTLKISRVEAEDVGVYYCMQAVQNPPTFGQGTKVEIKR

SEQ ID NO: 518 - protein, 11 aa, synthetic construct
  REGION 1..11: note = source = /note="Description of Artificial Sequence: Synthetic peptide"
QSLLYRNGYNY

SEQ ID NO: 519 - skipped

SEQ ID NO: 520 - protein, 9 aa, synthetic construct
  REGION 1..9: note = source = /note="Description of Artificial Sequence: Synthetic peptide"
MQAVQNPPT

SEQ ID NO: 521 - protein, 219 aa, synthetic construct
  REGION 1..219: note = source = /note="Description of Artificial Sequence: Synthetic polypeptide"
DVVMTQSPLSLPVTPGEPASISCRSSQSLLYRNGYNYLDWYLQKPGQSPQLLIYWGSYRASGVPDRFSGSGSGTDFTLKISRVEAEDVGVYYCMQAVQNPPTFGQGTKVEIKRTVAAPSVFIFPPSDEQLKSGTASVVCLLNNFYPREAKVQWKVDNALQSGNSQESVTEQDSKDSTYSLSSTLTLSKADYEKHKVYACEVTHQGLSSPVTKSFNRGEC

SEQ ID NO: 522 - protein, 129 aa, synthetic construct
  REGION 1..129: note = source = /note="Description of Artificial Sequence: Synthetic polypeptide"
QMQLVQSGAEVKKPGSSVKVSCKASGGTFSSSAISWVRQAPGQGFEWMGGIIPIYGITDYAQKFQGRVTITTDESTSTAYMELSSLTSEDTAVYYCARDDTARRVRGVPYYYYYAMDVWGQGTTVTVSS

SEQ ID NO: 523 - protein, 8 aa, synthetic construct
  REGION 1..8: note = source = /note="Description of Artificial Sequence: Synthetic peptide"
GGTFSSSA

SEQ ID NO: 524 - protein, 8 aa, synthetic construct
  REGION 1..8: note = source = /note="Description of Artificial Sequence: Synthetic peptide"
IIPIYGIT

SEQ ID NO: 525 - protein, 22 aa, synthetic construct
  REGION 1..22: note = source = /note="Description of Artificial Sequence: Synthetic peptide"
ARDDTARRVRGVPYYYYYAMDV

SEQ ID NO: 526 - protein, 459 aa, synthetic construct
  REGION 1..459: note = source = /note="Description of Artificial Sequence: Synthetic polypeptide"
QMQLVQSGAEVKKPGSSVKVSCKASGGTFSSSAISWVRQAPGQGFEWMGGIIPIYGITDYAQKFQGRVTITTDESTSTAYMELSSLTSEDTAVYYCARDDTARRVRGVPYYYYYAMDVWGQGTTVTVSSASTKGPSVFPLAPSSKSTSGGTAALGCLVKDYFPEPVTVSWNSGALTSGVHTFPAVLQSSGLYSLSSVVTVPSSSLGTQTYICNVNHKPSNTKVDKKVEPKSCDKTHTCPPCPAPELLGGPSVFLFPPKPKDTLMISRTPEVTCVVVDVSHEDPEVKFNWYVDGVEVHNAKTKPREEQYNSTYRVVSVLTVLHQDWLNGKEYKCKVSNKALPAPIEKTISKAKGQPREPQVYTLPPSREEMTKNQVSLTCLVKGFYPSDIAVEWESNGQPENNYKTTPPVLDSDGSFFLYSKLTVDKSRWQQGNVFSCSVMHEALHNHYTQKSLSLSPGK

SEQ ID NO: 527 - protein, 114 aa, synthetic construct
  REGION 1..114: note = source = /note="Description of Artificial Sequence: Synthetic polypeptide"
DIVMTQTPLSLPVTPGEPASMSCRSSRSLLDSDDGNTHLDWYLQKPGQSPQLLIQSLSYRASGVPDRFSGSGSGTDFTLEISRVEAEDVGIYYCMQRKEFPLTFGGGTKVEIKR

SEQ ID NO: 528 - protein, 12 aa, synthetic construct
  REGION 1..12: note = source = /note="Description of Artificial Sequence: Synthetic peptide"
RSLLDSDDGNTH

SEQ ID NO: 529 - skipped

SEQ ID NO: 530 - protein, 9 aa, synthetic construct
  REGION 1..9: note = source = /note="Description of Artificial Sequence: Synthetic peptide"
MQRKEFPLT

SEQ ID NO: 531 - protein, 220 aa, synthetic construct
  REGION 1..220: note = source = /note="Description of Artificial Sequence: Synthetic polypeptide"
DIVMTQTPLSLPVTPGEPASMSCRSSRSLLDSDDGNTHLDWYLQKPGQSPQLLIQSLSYRASGVPDRFSGSGSGTDFTLEISRVEAEDVGIYYCMQRKEFPLTFGGGTKVEIKRTVAAPSVFIFPPSDEQLKSGTASVVCLLNNFYPREAKVQWKVDNALQSGNSQESVTEQDSKDSTYSLSSTLTLSKADYEKHKVYACEVTHQGLSSPVTKSFNRGEC

SEQ ID NO: 532 - protein, 128 aa, synthetic construct
  REGION 1..128: note = source = /note="Description of Artificial Sequence: Synthetic polypeptide"
EVQLVQSGAEVKKPGSSVKVSCKASGGTFSSYAISWVRQAPGQGLEWMGGIIPIFGTANYAQKFQGRVTITADKSTSTAYMELSSLRSEDTAVYYCARGPWYYDSSGYSSYAYYMDVWGQGTTVTVSS

SEQ ID NO: 533 - protein, 8 aa, synthetic construct
  REGION 1..8: note = source = /note="Description of Artificial Sequence: Synthetic peptide"
GGTFSSYA

SEQ ID NO: 534 - protein, 8 aa, synthetic construct
  REGION 1..8: note = source = /note="Description of Artificial Sequence: Synthetic peptide"
IIPIFGTA

SEQ ID NO: 535 - protein, 21 aa, synthetic construct
  REGION 1..21: note = source = /note="Description of Artificial Sequence: Synthetic peptide"
ARGPWYYDSSGYSSYAYYMDV

SEQ ID NO: 536 - protein, 458 aa, synthetic construct; identical to SEQ ID NO: 286
  REGION 1..458: note = source = /note="Description of Artificial Sequence: Synthetic polypeptide"

SEQ ID NO: 537 - protein, 114 aa, synthetic construct
  REGION 1..114: note = source = /note="Description of Artificial Sequence: Synthetic polypeptide"
DVVMTQSPLSLPVTPGEPASISCRSSQSLLHSDGYNYLDWYLQKPGQSPQLLIYLGSNRASGVPDRFSGSGSGTDFTLKISRVEAEDVGVYYCMQALHTPGVTFGGGTKVEIKR

SEQ ID NO: 538 - protein, 11 aa, synthetic construct
  REGION 1..11: note = source = /note="Description of Artificial Sequence: Synthetic peptide"
QSLLHSDGYNY

SEQ ID NO: 539 - skipped

SEQ ID NO: 540 - protein, 10 aa, synthetic construct
  REGION 1..10: note = source = /note="Description of Artificial Sequence: Synthetic peptide"
MQALHTPGVT

SEQ ID NO: 541 - protein, 220 aa, synthetic construct
  REGION 1..220: note = source = /note="Description of Artificial Sequence: Synthetic polypeptide"
DVVMTQSPLSLPVTPGEPASISCRSSQSLLHSDGYNYLDWYLQKPGQSPQLLIYLGSNRASGVPDRFSGSGSGTDFTLKISRVEAEDVGVYYCMQALHTPGVTFGGGTKVEIKRTVAAPSVFIFPPSDEQLKSGTASVVCLLNNFYPREAKVQWKVDNALQSGNSQESVTEQDSKDSTYSLSSTLTLSKADYEKHKVYACEVTHQGLSSPVTKSFNRGEC

SEQ ID NO: 542 - protein, 123 aa, synthetic construct
  REGION 1..123: note = source = /note="Description of Artificial Sequence: Synthetic polypeptide"
QLQLQESGPGLVKPSETLSLTCTVTGGSISSSSYYWAWIRQPPGKGLEWIGGIYYSGSTYYNVSLESRVTISQDTSKNQFSLKLTSVTAADTAVYYCARGAWELRLGDWFDPWGQGTLVTVSS

SEQ ID NO: 543 - protein, 10 aa, synthetic construct
  REGION 1..10: note = source = /note="Description of Artificial Sequence: Synthetic peptide"
GGSISSSSYY

SEQ ID NO: 544 - protein, 7 aa, synthetic construct
  REGION 1..7: note = source = /note="Description of Artificial Sequence: Synthetic peptide"
IYYSGST

SEQ ID NO: 545 - protein, 15 aa, synthetic construct
  REGION 1..15: note = source = /note="Description of Artificial Sequence: Synthetic peptide"
ARGAWELRLGDWFDP

SEQ ID NO: 546 - protein, 453 aa, synthetic construct
  REGION 1..453: note = source = /note="Description of Artificial Sequence: Synthetic polypeptide"
QLQLQESGPGLVKPSETLSLTCTVTGGSISSSSYYWAWIRQPPGKGLEWIGGIYYSGSTYYNVSLESRVTISQDTSKNQFSLKLTSVTAADTAVYYCARGAWELRLGDWFDPWGQGTLVTVSSASTKGPSVFPLAPSSKSTSGGTAALGCLVKDYFPEPVTVSWNSGALTSGVHTFPAVLQSSGLYSLSSVVTVPSSSLGTQTYICNVNHKPSNTKVDKKVEPKSCDKTHTCPPCPAPELLGGPSVFLFPPKPKDTLMISRTPEVTCVVVDVSHEDPEVKFNWYVDGVEVHNAKTKPREEQYNSTYRVVSVLTVLHQDWLNGKEYKCKVSNKALPAPIEKTISKAKGQPREPQVYTLPPSREEMTKNQVSLTCLVKGFYPSDIAVEWESNGQPENNYKTTPPVLDSDGSFFLYSKLTVDKSRWQQGNVFSCSVMHEALHNHYTQKSLSLSPGK

SEQ ID NO: 547 - protein, 118 aa, synthetic construct
  REGION 1..118: note = source = /note="Description of Artificial Sequence: Synthetic polypeptide"
QSVLTQPPSVSGAPGQRVTISCTGSSSNIGAGYDIQWYQQLPGTAPKLLIYGYSNRPSGVPDRFSGSKSGTSASLAITGLQAEDEADYYCQSYDSSLSVYVVFGGGTQLTVLGQPKAA

SEQ ID NO: 548 - protein, 9 aa, synthetic construct
  REGION 1..9: note = source = /note="Description of Artificial Sequence: Synthetic peptide"
SSNIGAGYD

SEQ ID NO: 549 - skipped

SEQ ID NO: 550 - protein, 12 aa, synthetic construct
  REGION 1..12: note = source = /note="Description of Artificial Sequence: Synthetic peptide"
QSYDSSLSVYVV

SEQ ID NO: 551 - protein, 218 aa, synthetic construct
  REGION 1..218: note = source = /note="Description of Artificial Sequence: Synthetic polypeptide"
QSVLTQPPSVSGAPGQRVTISCTGSSSNIGAGYDIQWYQQLPGTAPKLLIYGYSNRPSGVPDRFSGSKSGTSASLAITGLQAEDEADYYCQSYDSSLSVYVVFGGGTQLTVLGQPKAAPSVTLFPPSSEELQANKATLVCLISDFYPGAVTVAWKADSSPVKAGVETTTPSKQSNNKYAASSYLSLTPEQWKSHRSYSCQVTHEGSTVEKTVAPTECS

SEQ ID NO: 552 - protein, 122 aa, synthetic construct
  REGION 1..122: note = source = /note="Description of Artificial Sequence: Synthetic polypeptide"
QVQLQESGGGVVQPGGSLRLSCAASRFTFEDYAMHWVRQPPGKGLEWVSGISWKSGGINYADSVKGRFTISRDNAQNSLYLQMNSLRAEDTALYYCVKDPTLVATDRAFNIWGQGTMVTVSS

SEQ ID NO: 553 - protein, 8 aa, synthetic construct
  REGION 1..8: note = source = /note="Description of Artificial Sequence: Synthetic peptide"
RFTFEDYA

SEQ ID NO: 554 - protein, 8 aa, synthetic construct
  REGION 1..8: note = source = /note="Description of Artificial Sequence: Synthetic peptide"
ISWKSGGI

SEQ ID NO: 555 - protein, 15 aa, synthetic construct
  REGION 1..15: note = source = /note="Description of Artificial Sequence: Synthetic peptide"
VKDPTLVATDRAFNI

SEQ ID NO: 556 - protein, 452 aa, synthetic construct
  REGION 1..452: note = source = /note="Description of Artificial Sequence: Synthetic polypeptide"
QVQLQESGGGVVQPGGSLRLSCAASRFTFEDYAMHWVRQPPGKGLEWVSGISWKSGGINYADSVKGRFTISRDNAQNSLYLQMNSLRAEDTALYYCVKDPTLVATDRAFNIWGQGTMVTVSSASTKGPSVFPLAPSSKSTSGGTAALGCLVKDYFPEPVTVSWNSGALTSGVHTFPAVLQSSGLYSLSSVVTVPSSSLGTQTYICNVNHKPSNTKVDKKVEPKSCDKTHTCPPCPAPELLGGPSVFLFPPKPKDTLMISRTPEVTCVVVDVSHEDPEVKFNWYVDGVEVHNAKTKPREEQYNSTYRVVSVLTVLHQDWLNGKEYKCKVSNKALPAPIEKTISKAKGQPREPQVYTLPPSREEMTKNQVSLTCLVKGFYPSDIAVEWESNGQPENNYKTTPPVLDSDGSFFLYSKLTVDKSRWQQGNVFSCSVMHEALHNHYTQKSLSLSPGK

SEQ ID NO: 557 - protein, 117 aa, synthetic construct
  REGION 1..117: note = source = /note="Description of Artificial Sequence: Synthetic polypeptide"
DVVMTQSPLSLPVTPGEPASISCRSSQSLLHSNGYNYLDWYLQKPGQSPQLLIYLGSNRASGVPDRFSGSGSGTDFTLKISRVEAEDVGVYYCMQYLQTPDTFGQGTKLEIKRAAPS

SEQ ID NO: 558 - protein, 11 aa, synthetic construct
  REGION 1..11: note = source = /note="Description of Artificial Sequence: Synthetic peptide"
QSLLHSNGYNY

SEQ ID NO: 559 - skipped

SEQ ID NO: 560 - protein, 9 aa, synthetic construct
  REGION 1..9: note = source = /note="Description of Artificial Sequence: Synthetic peptide"
MQYLQTPDT

SEQ ID NO: 561 - protein, 219 aa, synthetic construct
  REGION 1..219: note = source = /note="Description of Artificial Sequence: Synthetic polypeptide"
DVVMTQSPLSLPVTPGEPASISCRSSQSLLHSNGYNYLDWYLQKPGQSPQLLIYLGSNRASGVPDRFSGSGSGTDFTLKISRVEAEDVGVYYCMQYLQTPDTFGQGTKLEIKRTVAAPSVFIFPPSDEQLKSGTASVVCLLNNFYPREAKVQWKVDNALQSGNSQESVTEQDSKDSTYSLSSTLTLSKADYEKHKVYACEVTHQGLSSPVTKSFNRGEC

SEQ ID NO: 562 - protein, 129 aa, synthetic construct; identical to SEQ ID NO: 462
  REGION 1..129: note = source = /note="Description of Artificial Sequence: Synthetic polypeptide"

SEQ ID NO: 563 - protein, 8 aa, synthetic construct
  REGION 1..8: note = source = /note="Description of Artificial Sequence: Synthetic peptide"
GGTFSSSA

SEQ ID NO: 564 - protein, 8 aa, synthetic construct
  REGION 1..8: note = source = /note="Description of Artificial Sequence: Synthetic peptide"
IIPIYGIT

SEQ ID NO: 565 - protein, 22 aa, synthetic construct
  REGION 1..22: note = source = /note="Description of Artificial Sequence: Synthetic peptide"
ARDDTARRVRGVPYYYYYAMDV

SEQ ID NO: 566 - protein, 459 aa, synthetic construct; identical to SEQ ID NO: 466
  REGION 1..459: note = source = /note="Description of Artificial Sequence: Synthetic polypeptide"

SEQ ID NO: 567 - protein, 114 aa, synthetic construct
  REGION 1..114: note = source = /note="Description of Artificial Sequence: Synthetic polypeptide"
EIVLTQSPDFQSVTPKEKVTITCRASQNIDSSLHWYQQKPGQSPKLLINYASQSFSGVPSRFSGSGSGTDFTLTIDSLEPEDAATYFCHQSSSLPLTFGGGTKVEIRRTVAAPS

SEQ ID NO: 568 - protein, 6 aa, synthetic construct
  REGION 1..6: note = source = /note="Description of Artificial Sequence: Synthetic peptide"
QNIDSS

SEQ ID NO: 569 - skipped

SEQ ID NO: 570 - protein, 9 aa, synthetic construct
  REGION 1..9: note = source = /note="Description of Artificial Sequence: Synthetic peptide"
HQSSSLPLT

SEQ ID NO: 571 - protein, 218 aa, synthetic construct; identical to SEQ ID NO: 551
  REGION 1..218: note = source = /note="Description of Artificial Sequence: Synthetic polypeptide"

SEQ ID NO: 572 - protein, 129 aa, synthetic construct
  REGION 1..129: note = source = /note="Description of Artificial Sequence: Synthetic polypeptide"
EVQLVQSGAEVKKPGSSVKVSCKTSGGTFSSSAISWVRQAPGQGFEWMGGIIPIYGITDYAQKFQGRVTITTDESTSTAYMELSSLTSEDTAVYYCARDDTARRVRGVPYYYYYAMDVWGQGTTVTVSS

SEQ ID NO: 573 - protein, 8 aa, synthetic construct
  REGION 1..8: note = source = /note="Description of Artificial Sequence: Synthetic peptide"
GGTFSSSA

SEQ ID NO: 574 - protein, 8 aa, synthetic construct
  REGION 1..8: note = source = /note="Description of Artificial Sequence: Synthetic peptide"
IIPIYGIT

SEQ ID NO: 575 - protein, 22 aa, synthetic construct
  REGION 1..22: note = source = /note="Description of Artificial Sequence: Synthetic peptide"
ARDDTARRVRGVPYYYYYAMDV

SEQ ID NO: 576 - protein, 459 aa, synthetic construct
  REGION 1..459: note = source = /note="Description of Artificial Sequence: Synthetic polypeptide"
EVQLVQSGAEVKKPGSSVKVSCKTSGGTFSSSAISWVRQAPGQGFEWMGGIIPIYGITDYAQKFQGRVTITTDESTSTAYMELSSLTSEDTAVYYCARDDTARRVRGVPYYYYYAMDVWGQGTTVTVSSASTKGPSVFPLAPSSKSTSGGTAALGCLVKDYFPEPVTVSWNSGALTSGVHTFPAVLQSSGLYSLSSVVTVPSSSLGTQTYICNVNHKPSNTKVDKKVEPKSCDKTHTCPPCPAPELLGGPSVFLFPPKPKDTLMISRTPEVTCVVVDVSHEDPEVKFNWYVDGVEVHNAKTKPREEQYNSTYRVVSVLTVLHQDWLNGKEYKCKVSNKALPAPIEKTISKAKGQPREPQVYTLPPSREEMTKNQVSLTCLVKGFYPSDIAVEWESNGQPENNYKTTPPVLDSDGSFFLYSKLTVDKSRWQQGNVFSCSVMHEALHNHYTQKSLSLSPGK

SEQ ID NO: 577 - protein, 114 aa, synthetic construct
  REGION 1..114: note = source = /note="Description of Artificial Sequence: Synthetic polypeptide"
EIVLTQSPGTLSLSPGERATLSCRASQSVSSYLAWYQQKPGQAPRLLIYDASNRATGIPARFSGSGSGTDFTLTISSLQSEDFAVYYCQQYDDWPQTFGQGTRLEIKRTVAAPS

SEQ ID NO: 578 - protein, 6 aa, synthetic construct
  REGION 1..6: note = source = /note="Description of Artificial Sequence: Synthetic peptide"
QSVSSY

SEQ ID NO: 579 - skipped

SEQ ID NO: 580 - protein, 9 aa, synthetic construct
  REGION 1..9: note = source = /note="Description of Artificial Sequence: Synthetic peptide"
QQYDDWPQT

SEQ ID NO: 581 - protein, 214 aa, synthetic construct
  REGION 1..214: note = source = /note="Description of Artificial Sequence: Synthetic polypeptide"
EIVLTQSPGTLSLSPGERATLSCRASQSVSSYLAWYQQKPGQAPRLLIYDASNRATGIPARFSGSGSGTDFTLTISSLQSEDFAVYYCQQYDDWPQTFGQGTRLEIKRTVAAPSVFIFPPSDEQLKSGTASVVCLLNNFYPREAKVQWKVDNALQSGNSQESVTEQDSKDSTYSLSSTLTLSKADYEKHKVYACEVTHQGLSSPVTKSFNRGEC

SEQ ID NO: 582 - protein, 129 aa, synthetic construct; identical to SEQ ID NO: 522
  REGION 1..129: note = source = /note="Description of Artificial Sequence: Synthetic polypeptide"

SEQ ID NO: 583 - protein, 8 aa, synthetic construct
  REGION 1..8: note = source = /note="Description of Artificial Sequence: Synthetic peptide"
GGTFSSSA

SEQ ID NO: 584 - protein, 8 aa, synthetic construct
  REGION 1..8: note = source = /note="Description of Artificial Sequence: Synthetic peptide"
IIPIYGIT

SEQ ID NO: 585 - protein, 22 aa, synthetic construct
  REGION 1..22: note = source = /note="Description of Artificial Sequence: Synthetic peptide"
ARDDTARRVRGVPYYYYYAMDV

SEQ ID NO: 586 - protein, 459 aa, synthetic construct; identical to SEQ ID NO: 526
  REGION 1..459: note = source = /note="Description of Artificial Sequence: Synthetic polypeptide"

SEQ ID NO: 587 - protein, 114 aa, synthetic construct
  REGION 1..114: note = source = /note="Description of Artificial Sequence: Synthetic polypeptide"
EIVMTQSPATLSLSTGERATLFCRTSQNVYGEVAWYQQKPGQAPRLLIYDTFERAAGIPAKFSGSGSGTDFTLTISRVEPEDFAVYYCQQRRDWPITFGQGTRLEIKRTVAAPS

SEQ ID NO: 588 - protein, 6 aa, synthetic construct
  REGION 1..6: note = source = /note="Description of Artificial Sequence: Synthetic peptide"
QNVYGE

SEQ ID NO: 589 - skipped

SEQ ID NO: 590 - protein, 9 aa, synthetic construct
  REGION 1..9: note = source = /note="Description of Artificial Sequence: Synthetic peptide"
QQRRDWPIT

SEQ ID NO: 591 - protein, 214 aa, synthetic construct
  REGION 1..214: note = source = /note="Description of Artificial Sequence: Synthetic polypeptide"
EIVMTQSPATLSLSTGERATLFCRTSQNVYGEVAWYQQKPGQAPRLLIYDTFERAAGIPAKFSGSGSGTDFTLTISRVEPEDFAVYYCQQRRDWPITFGQGTRLEIKRTVAAPSVFIFPPSDEQLKSGTASVVCLLNNFYPREAKVQWKVDNALQSGNSQESVTEQDSKDSTYSLSSTLTLSKADYEKHKVYACEVTHQGLSSPVTKSFNRGEC

SEQ ID NO: 592 - protein, 129 aa, synthetic construct; identical to SEQ ID NO: 462
  REGION 1..129: note = source = /note="Description of Artificial Sequence: Synthetic polypeptide"

SEQ ID NO: 593 - protein, 8 aa, synthetic construct
  REGION 1..8: note = source = /note="Description of Artificial Sequence: Synthetic peptide"
GGTFSSSA

SEQ ID NO: 594 - protein, 8 aa, synthetic construct
  REGION 1..8: note = source = /note="Description of Artificial Sequence: Synthetic peptide"
IIPIYGIT

SEQ ID NO: 595 - protein, 22 aa, synthetic construct
  REGION 1..22: note = source = /note="Description of Artificial Sequence: Synthetic peptide"
ARDDTARRVRGVPYYYYYAMDV

SEQ ID NO: 596 - protein, 459 aa, synthetic construct; identical to SEQ ID NO: 466
  REGION 1..459: note = source = /note="Description of Artificial Sequence: Synthetic polypeptide"

SEQ ID NO: 597 - protein, 114 aa, synthetic construct
  REGION 1..114: note = source = /note="Description of Artificial Sequence: Synthetic polypeptide"
DIQMTQSPSSLSASVGDRVTITCQASRDISDSLSWYQQKPGKAPKLLIFDASNLKTGVSSRFSGSGSGTDFTFTISSLQPEDIATYYCHQYDNLPLTFGGGTKVEIKRTVAAPS

SEQ ID NO: 598 - protein, 6 aa, synthetic construct
  REGION 1..6: note = source = /note="Description of Artificial Sequence: Synthetic peptide"
RDISDS

SEQ ID NO: 599 - skipped

SEQ ID NO: 600 - protein, 9 aa, synthetic construct
  REGION 1..9: note = source = /note="Description of Artificial Sequence: Synthetic peptide"
HQYDNLPLT

SEQ ID NO: 601 - protein, 214 aa, synthetic construct
  REGION 1..214: note = source = /note="Description of Artificial Sequence: Synthetic polypeptide"
DIQMTQSPSSLSASVGDRVTITCQASRDISDSLSWYQQKPGKAPKLLIFDASNLKTGVSSRFSGSGSGTDFTFTISSLQPEDIATYYCHQYDNLPLTFGGGTKVEIKRTVAAPSVFIFPPSDEQLKSGTASVVCLLNNFYPREAKVQWKVDNALQSGNSQESVTEQDSKDSTYSLSSTLTLSKADYEKHKVYACEVTHQGLSSPVTKSFNRGEC

SEQ ID NO: 602 - protein, 129 aa, synthetic construct; identical to SEQ ID NO: 522
  REGION 1..129: note = source = /note="Description of Artificial Sequence: Synthetic polypeptide"

SEQ ID NO: 603 - protein, 8 aa, synthetic construct
  REGION 1..8: note = source = /note="Description of Artificial Sequence: Synthetic peptide"
GGTFSSSA

SEQ ID NO: 604 - protein, 8 aa, synthetic construct
  REGION 1..8: note = source = /note="Description of Artificial Sequence: Synthetic peptide"
IIPIYGIT

SEQ ID NO: 605 - protein, 22 aa, synthetic construct
  REGION 1..22: note = source = /note="Description of Artificial Sequence: Synthetic peptide"
ARDDTARRVRGVPYYYYYAMDV

SEQ ID NO: 606 - protein, 459 aa, synthetic construct; identical to SEQ ID NO: 526
  REGION 1..459: note = source = /note="Description of Artificial Sequence: Synthetic polypeptide"

SEQ ID NO: 607 - protein, 114 aa, synthetic construct
  REGION 1..114: note = source = /note="Description of Artificial Sequence: Synthetic polypeptide"
EIVMTQSPATLSLSPGERATLSCRASESVTTFLAWYQQKPGQAPRLLITDASNRATGIPGRFSGSGSGTDFTLTISSLEPEDFAVYYCHQHTNWPLTFGGGTKLEIKRTVAAPS

SEQ ID NO: 608 - protein, 6 aa, synthetic construct
  REGION 1..6: note = source = /note="Description of Artificial Sequence: Synthetic peptide"
ESVTTF

SEQ ID NO: 609 - skipped

SEQ ID NO: 610 - protein, 9 aa, synthetic construct
  REGION 1..9: note = source = /note="Description of Artificial Sequence: Synthetic peptide"
HQHTNWPLT

SEQ ID NO: 611 - protein, 214 aa, synthetic construct
  REGION 1..214: note = source = /note="Description of Artificial Sequence: Synthetic polypeptide"
EIVMTQSPATLSLSPGERATLSCRASESVTTFLAWYQQKPGQAPRLLITDASNRATGIPGRFSGSGSGTDFTLTISSLEPEDFAVYYCHQHTNWPLTFGGGTKLEIKRTVAAPSVFIFPPSDEQLKSGTASVVCLLNNFYPREAKVQWKVDNALQSGNSQESVTEQDSKDSTYSLSSTLTLSKADYEKHKVYACEVTHQGLSSPVTKSFNRGEC

SEQ ID NO: 612 - protein, 129 aa, synthetic construct
  REGION 1..129: note = source = /note="Description of Artificial Sequence: Synthetic polypeptide"
EVQLVQSGAEVKKPGASVKVSCKVSGYTLTELSMHWVRQAPGKGLEWMGGFDPEDGETIYAQKFQGRVTMTEDTSTDTAYMELSSLRSEDTAVYYCATEVGYCSGGSCYISYYYGMDVWGQGTTVTVSS

SEQ ID NO: 613 - protein, 8 aa, synthetic construct
  REGION 1..8: note = source = /note="Description of Artificial Sequence: Synthetic peptide"
GYTLTELS

SEQ ID NO: 614 - protein, 8 aa, synthetic construct
  REGION 1..8: note = source = /note="Description of Artificial Sequence: Synthetic peptide"
FDPEDGET

SEQ ID NO: 615 - protein, 22 aa, synthetic construct
  REGION 1..22: note = source = /note="Description of Artificial Sequence: Synthetic peptide"
ATEVGYCSGGSCYISYYYGMDV

SEQ ID NO: 616 - protein, 459 aa, synthetic construct
  REGION 1..459: note = source = /note="Description of Artificial Sequence: Synthetic polypeptide"
EVQLVQSGAEVKKPGASVKVSCKVSGYTLTELSMHWVRQAPGKGLEWMGGFDPEDGETIYAQKFQGRVTMTEDTSTDTAYMELSSLRSEDTAVYYCATEVGYCSGGSCYISYYYGMDVWGQGTTVTVSSASTKGPSVFPLAPSSKSTSGGTAALGCLVKDYFPEPVTVSWNSGALTSGVHTFPAVLQSSGLYSLSSVVTVPSSSLGTQTYICNVNHKPSNTKVDKKVEPKSCDKTHTCPPCPAPELLGGPSVFLFPPKPKDTLMISRTPEVTCVVVDVSHEDPEVKFNWYVDGVEVHNAKTKPREEQYNSTYRVVSVLTVLHQDWLNGKEYKCKVSNKALPAPIEKTISKAKGQPREPQVYTLPPSREEMTKNQVSLTCLVKGFYPSDIAVEWESNGQPENNYKTTPPVLDSDGSFFLYSKLTVDKSRWQQGNVFSCSVMHEALHNHYTQKSLSLSPGK

SEQ ID NO: 617 - protein, 119 aa, synthetic construct
  REGION 1..119: note = source = /note="Description of Artificial Sequence: Synthetic polypeptide"
DVVMTQSPLSLPVTPGEPASISCRSSQSLLYRNGHNFLDWYVQKPGQSPQLLIYLGSNRASGVPDRFSGSGSGTDFTLKISRVEAEDVGVYYCMQALQTPPTFGQGTKLEIKRTVAAPS

SEQ ID NO: 618 - protein, 11 aa, synthetic construct
  REGION 1..11: note = source = /note="Description of Artificial Sequence: Synthetic peptide"
QSLLYRNGHNF

SEQ ID NO: 619 - skipped

SEQ ID NO: 620 - protein, 9 aa, synthetic construct
  REGION 1..9: note = source = /note="Description of Artificial Sequence: Synthetic peptide"
MQALQTPPT

SEQ ID NO: 621 - protein, 219 aa, synthetic construct
  REGION 1..219: note = source = /note="Description of Artificial Sequence: Synthetic polypeptide"
DVVMTQSPLSLPVTPGEPASISCRSSQSLLYRNGHNFLDWYVQKPGQSPQLLIYLGSNRASGVPDRFSGSGSGTDFTLKISRVEAEDVGVYYCMQALQTPPTFGQGTKLEIKRTVAAPSVFIFPPSDEQLKSGTASVVCLLNNFYPREAKVQWKVDNALQSGNSQESVTEQDSKDSTYSLSSTLTLSKADYEKHKVYACEVTHQGLSSPVTKSFNRGEC

SEQ ID NO: 622 - protein, 120 aa, synthetic construct
  REGION 1..120: note = source = /note="Description of Artificial Sequence: Synthetic polypeptide"
EVQLQQSGAELVRSGASVKMSCKVNDYTFTNYNMHWLRQTPGQGLEWIGYIYPGNGDTNYNQKFKGKATLTADTSSSTAYMQIISLTSEDPAVYFCARQGIHYYYIDVWGAGTTVTVSSG

SEQ ID NO: 623 - protein, 10 aa, synthetic construct
  REGION 1..10: note = source = /note="Description of Artificial Sequence: Synthetic peptide"
DYTFTNYNMH

SEQ ID NO: 624 - protein, 13 aa, synthetic construct
  REGION 1..13: note = source = /note="Description of Artificial Sequence: Synthetic peptide"
YIYPGNGDTNYNQ

SEQ ID NO: 625 - protein, 10 aa, synthetic construct
  REGION 1..10: note = source = /note="Description of Artificial Sequence: Synthetic peptide"
QGIHYYYIDV

SEQ ID NO: 626 - protein, 110 aa, synthetic construct
  REGION 1..110: note = source = /note="Description of Artificial Sequence: Synthetic polypeptide"
DIEMTQSPATLSVTPGDRVSLSCRASQSIRDYLHWYQQKSHESPRLLIKYVSQSISGIPSRFSGSGSGSEFTLSINSVEPEDVGVYYCQNGHSLPLTFGSGTKLEIKRTV

SEQ ID NO: 627 - protein, 11 aa, synthetic construct
  REGION 1..11: note = source = /note="Description of Artificial Sequence: Synthetic peptide"
RASQSIRDYLH

SEQ ID NO: 628 - protein, 7 aa, synthetic construct
  REGION 1..7: note = source = /note="Description of Artificial Sequence: Synthetic peptide"
YVSQSIS

SEQ ID NO: 629 - protein, 9 aa, synthetic construct
  REGION 1..9: note = source = /note="Description of Artificial Sequence: Synthetic peptide"
QNGHSLPLT

SEQ ID NO: 630 - protein, 118 aa, synthetic construct
  REGION 1..118: note = source = /note="Description of Artificial Sequence: Synthetic polypeptide"
QVQLQQSGAELAKPGASVKMSCKASGYTFTSDWMHWVKQRPGQGLEWIGYINPSTGYTEYNQKFKDKATLTADKSSSTAYMQLRSLTSEDSAVYYCARGSSGSWFAYWGQGTLVTVSA

SEQ ID NO: 631 - protein, 5 aa, synthetic construct
  REGION 1..5: note = source = /note="Description of Artificial Sequence: Synthetic peptide"
SDWMH

SEQ ID NO: 632 - protein, 17 aa, synthetic construct
  REGION 1..17: note = source = /note="Description of Artificial Sequence: Synthetic peptide"
YINPSTGYTEYNQKFKD

SEQ ID NO: 633 - protein, 9 aa, synthetic construct
  REGION 1..9: note = source = /note="Description of Artificial Sequence: Synthetic peptide"
GSSGSWFAY

SEQ ID NO: 634 - protein, 111 aa, synthetic construct
  REGION 1..111: note = source = /note="Description of Artificial Sequence: Synthetic polypeptide"
DIVLTQSPASLAVSLGQRATISCRASQSVSTSSYSYMHWYQQKPGQPPKLLIKYASNLESGVPARFSGSGSGTDFTLNIHPVEEEDTATYYCQHSWEIPYTFGGGTKLEIK

SEQ ID NO: 635 - protein, 15 aa, synthetic construct
  REGION 1..15: note = source = /note="Description of Artificial Sequence: Synthetic peptide"
RASQSVSTSSYSYMH

SEQ ID NO: 636 - protein, 7 aa, synthetic construct
  REGION 1..7: note = source = /note="Description of Artificial Sequence: Synthetic peptide"
YASNLES

SEQ ID NO: 637 - protein, 9 aa, synthetic construct
  REGION 1..9: note = source = /note="Description of Artificial Sequence: Synthetic peptide"
QHSWEIPYT

SEQ ID NO: 638 - protein, 118 aa, synthetic construct; identical to SEQ ID NO: 630
  REGION 1..118: note = source = /note="Description of Artificial Sequence: Synthetic polypeptide"

SEQ ID NO: 639 - protein, 5 aa, synthetic construct
  REGION 1..5: note = source = /note="Description of Artificial Sequence: Synthetic peptide"
SDWMH

SEQ ID NO: 640 - protein, 17 aa, synthetic construct
  REGION 1..17: note = source = /note="Description of Artificial Sequence: Synthetic peptide"
YINPSTGYTEYNQKFKD

SEQ ID NO: 641 - protein, 9 aa, synthetic construct
  REGION 1..9: note = source = /note="Description of Artificial Sequence: Synthetic peptide"
GSSGSWFAY

SEQ ID NO: 642 - protein, 112 aa, synthetic construct
  REGION 1..112: note = source = /note="Description of Artificial Sequence: Synthetic polypeptide"
DVVMTQTPLTLSVTIGQPASISCKSSQSLLNSDGKTYLNWLLQRPGQSPKRLIYLVSKLDSGVPDRFTGSGSGTDFTLKISRVEAEDLGVYYCWQGTHFPRTFGGGTKLEIK

SEQ ID NO: 643 - protein, 16 aa, synthetic construct
  REGION 1..16: note = source = /note="Description of Artificial Sequence: Synthetic peptide"
KSSQSLLNSDGKTYLN

SEQ ID NO: 644 - protein, 7 aa, synthetic construct
  REGION 1..7: note = source = /note="Description of Artificial Sequence: Synthetic peptide"
LVSKLDS

SEQ ID NO: 645 - protein, 9 aa, synthetic construct
  REGION 1..9: note = source = /note="Description of Artificial Sequence: Synthetic peptide"
WQGTHFPRT

SEQ ID NO: 646 - protein, 114 aa, synthetic construct
  REGION 1..114: note = source = /note="Description of Artificial Sequence: Synthetic polypeptide"
EVQLQQSVAELVRPGTSVTISCKASGYTFTNYWLGWVKQRPGHGLEWIGDIFPGGDYPNYNEKFKGKATLTADTSSSTAYMQLSSLTSEDSSVYFCTRGYFDVWGAGTTVTVSS

SEQ ID NO: 647 - protein, 6 aa, synthetic construct
  REGION 1..6: note = source = /note="Description of Artificial Sequence: Synthetic peptide"
TNYWLG

SEQ ID NO: 648 - protein, 17 aa, synthetic construct
  REGION 1..17: note = source = /note="Description of Artificial Sequence: Synthetic peptide"
DIFPGGDYPNYNEKFKG

SEQ ID NO: 649 - protein, 7 aa, synthetic construct
  REGION 1..7: note = source = /note="Description of Artificial Sequence: Synthetic peptide"
TRGYFDV

SEQ ID NO: 650 - protein, 114 aa, synthetic construct
  REGION 1..114: note = source = /note="Description of Artificial Sequence: Synthetic polypeptide"
DIQMTQSPSSLSVSAGEKVTMSCKSSQSLLNSENQKNYLAWFQQKPGQPPKMLIYGASTRESGVPDRFTGSGSGTDFTLTISSVQAEDLAVYYCQNDHSYPFTFGSGTKLEIKR

SEQ ID NO: 651 - protein, 17 aa, synthetic construct
  REGION 1..17: note = source = /note="Description of Artificial Sequence: Synthetic peptide"
KSSQSLLNSENQKNYLA

SEQ ID NO: 652 - protein, 7 aa, synthetic construct
  REGION 1..7: note = source = /note="Description of Artificial Sequence: Synthetic peptide"
GASTRES

SEQ ID NO: 653 - protein, 7 aa, synthetic construct
  REGION 1..7: note = source = /note="Description of Artificial Sequence: Synthetic peptide"
QNDHSYP

SEQ ID NO: 654 - protein, 330 aa, unidentified [sequence omitted]

SEQ ID NO: 655 - protein, 326 aa, unidentified
  REGION 1..326: note = source = /note="Description of Unknown: IgG2 sequence"
ASTKGPSVFPLAPCSRSTSESTAALGCLVKDYFPEPVTVSWNSGALTSGVHTFPAVLQSSGLYSLSSVVTVPSSNFGTQTYTCNVDHKPSNTKVDKTVERKCCVECPPCPAPPVAGPSVFLFPPKPKDTLMISRTPEVTCVVVDVSHEDPEVQFNWYVDGVEVHNAKTKPREEQFNSTFRVVSVLTVVHQDWLNGKEYKCKVSNKGLPAPIEKTISKTKGQPREPQVYTLPPSREEMTKNQVSLTCLVKGFYPSDIAVEWESNGQPENNYKTTPPMLDSDGSFFLYSKLTVDKSRWQQGNVFSCSVMHEALHNHYTQKSLSLSPGK

SEQ ID NO: 656 - protein, 377 aa, unidentified
  REGION 1..377: note = source = /note="Description of Unknown: IgG3 sequence"
ASTKGPSVFPLAPCSRSTSGGTAALGCLVKDYFPEPVTVSWNSGALTSGVHTFPAVLQSSGLYSLSSVVTVPSSSLGTQTYTCNVNHKPSNTKVDKRVELKTPLGDTTHTCPRCPEPKSCDTPPPCPRCPEPKSCDTPPPCPRCPEPKSCDTPPPCPRCPAPELLGGPSVFLFPPKPKDTLMISRTPEVTCVVVDVSHEDPEVQFKWYVDGVEVHNAKTKPREEQYNSTFRVVSVLTVLHQDWLNGKEYKCKVSNKALPAPIEKTISKTKGQPREPQVYTLPPSREEMTKNQVSLTCLVKGFYPSDIAVEWESSGQPENNYNTTPPMLDSDGSFFLYSKLTVDKSRWQQGNIFSCSVMHEALHNRFTQKSLSLSPGK

SEQ ID NO: 657 - protein, 327 aa, unidentified
  REGION 1..327: note = source = /note="Description of Unknown: IgG4 sequence"
ASTKGPSVFPLAPCSRSTSESTAALGCLVKDYFPEPVTVSWNSGALTSGVHTFPAVLQSSGLYSLSSVVTVPSSSLGTKTYTCNVDHKPSNTKVDKRVESKYGPPCPSCPAPEFLGGPSVFLFPPKPKDTLMISRTPEVTCVVVDVSQEDPEVQFNWYVDGVEVHNAKTKPREEQFNSTYRVVSVLTVLHQDWLNGKEYKCKVSNKGLPSSIEKTISKAKGQPREPQVYTLPPSQEEMTKNQVSLTCLVKGFYPSDIAVEWESNGQPENNYKTTPPVLDSDGSFFLYSRLTVDKSRWQEGNVFSCSVMHEALHNHYTQKSLSLSLGK

SEQ ID NO: 658 - protein, 327 aa, unidentified
  REGION 1..327: note = source = /note="Description of Unknown: IgG4 alternate version sequence"
ASTKGPSVFPLAPCSRSTSESTAALGCLVKDYFPEPVTVSWNSGALTSGVHTFPAVLQSSGLYSLSSVVTVPSSSLGTKTYTCNVDHKPSNTKVDKRVESKYGPPCPPCPAPEFLGGPSVFLFPPKPKDTLMISRTPEVTCVVVDVSQEDPEVQFNWYVDGVEVHNAKTKPREEQFNSTYRVVSVLTVLHQDWLNGKEYKCKVSNKGLPSSIEKTISKAKGQPREPQVYTLPPSQEEMTKNQVSLTCLVKGFYPSDIAVEWESNGQPENNYKTTPPVLDSDGSFFLYSRLTVDKSRWQEGNVFSCSVMHEALHNHYTQKSLSLSPGK

SEQ ID NO: 659 - protein, 119 aa, synthetic construct
  REGION 1..119: note = source = /note="Description of Artificial Sequence: Synthetic polypeptide"
DVKFVESGGGLVKVGGSLKLSCAASGFTFSTYYMSWVRQTPEKRLELVAVINPTGGRTDFLDSVRGRFTISRDNAKNTLYLQMTSLKSEDTALYHCARRGELGRALDYWGQGTSVTVSS

SEQ ID NO: 660 - protein, 5 aa, synthetic construct
  REGION 1..5: note = source = /note="Description of Artificial Sequence: Synthetic peptide"
TYYMS

SEQ ID NO: 661 - protein, 17 aa, synthetic construct
  REGION 1..17: note = source = /note="Description of Artificial Sequence: Synthetic peptide"
VINPTGGRTDFLDSVRG

SEQ ID NO: 662 - protein, 10 aa, synthetic construct
  REGION 1..10: note = source = /note="Description of Artificial Sequence: Synthetic peptide"
RGELGRALDY

SEQ ID NO: 663 - protein, 111 aa, synthetic construct
  REGION 1..111: note = source = /note="Description of Artificial Sequence: Synthetic polypeptide"
NIVLTQFPASLAVSLGQRASISCRASESVDSYGYSFIHWYQQKPGQPPKLLIYLASSLESGVPARFSGSGSRTDFTLTIDPVEANDAATYYCQQNNGDPWTFGGGTKLEIK

SEQ ID NO: 664 - protein, 15 aa, synthetic construct
  REGION 1..15: note = source = /note="Description of Artificial Sequence: Synthetic peptide"
RASESVDSYGYSFIH

SEQ ID NO: 665 - protein, 7 aa, synthetic construct
  REGION 1..7: note = source = /note="Description of Artificial Sequence: Synthetic peptide"
LASSLES

SEQ ID NO: 666 - protein, 9 aa, synthetic construct
  REGION 1..9: note = source = /note="Description of Artificial Sequence: Synthetic peptide"
QQNNGDPWT

SEQ ID NO: 667 - protein, 98 aa, synthetic construct
  REGION 1..98: note = source = /note="Description of Artificial Sequence: Synthetic polypeptide"
QVQLVQSGAEVKKPGASVKVSCKASGYTFTSYYMHWVRQAPGQGLEWMGIINPSGGSTSYAQKFQGRVTMTRDTSTSTVYMELSSLRSEDTAVYYCAR

SEQ ID NO: 668 - protein, 15 aa, synthetic construct
  REGION 1..15: note = source = /note="Description of Artificial Sequence: Synthetic peptide"
YFDYWGQGTLVTVSS

SEQ ID NO: 669 - protein, 120 aa, synthetic construct; identical to SEQ ID NO: 78
  VARIANT 33: note = /replace="Q" or "S" or "A"
  VARIANT 105: note = /replace="Q" or "S" or "A"
  SITE 1..120: note = /note="Variant residues given in the sequence have no preference with respect to those in the annotations for variant positions"
  REGION 1..120: note = source = /note="Description of Artificial Sequence: Synthetic polypeptide"

SEQ ID NO: 670 - protein, 98 aa, synthetic construct; identical to SEQ ID NO: 667
  VARIANT 33: note = /replace="Q" or "S" or "A"
  SITE 1..98: note = /note="Variant residues given in the sequence have no preference with respect to those in the annotations for variant positions"
  REGION 1..98: note = source = /note="Description of Artificial Sequence: Synthetic polypeptide"

SEQ ID NO: 671 - protein, 120 aa, synthetic construct; identical to SEQ ID NO: 4
  VARIANT 33: note = /replace="Q" or "S" or "A"
  VARIANT 105: note = /replace="Q" or "S" or "A"
  SITE 1..120: note = /note="Variant residues given in the sequence have no preference with respect to those in the annotations for variant positions"
  REGION 1..120: note = source = /note="Description of Artificial Sequence: Synthetic polypeptide"

SEQ ID NO: 672 - protein, 120 aa, synthetic construct
  VARIANT 33: note = /replace="Q" or "S" or "A"
  VARIANT 105: note = /replace="Q" or "S" or "A"
  SITE 1..120: note = /note="Variant residues given in the sequence have no preference with respect to those in the annotations for variant positions"
  REGION 1..120: note = source = /note="Description of Artificial Sequence: Synthetic polypeptide"
QVQLVQSGAEVKKPGASVKVSCKASGYTFTDYNINWVRQAPGQGLEWIGYIYPYIGGSGYAQKFQGRVTMTADTSTSTVYMELSSLRSEDTAVYYCAREDKTARNAMDYWGQGTLVTVSS

SEQ ID NO: 673 - protein, 120 aa, synthetic construct
  VARIANT 33: note = /replace="Q" or "S" or "A"
  VARIANT 105: note = /replace="Q" or "S" or "A"
  SITE 1..120: note = /note="Variant residues given in the sequence have no preference with respect to those in the annotations for variant positions"
  REGION 1..120: note = source = /note="Description of Artificial Sequence: Synthetic polypeptide"
QVQLVQSGAEVKKPGASVKISCKASGYTFTDYNINWVRQAPGQGLEWIGYIYPYIGGSGYAQKFQGRATLTADTSTSTAYMELSSLRSEDTAVYYCAREDKTARNAMDYWGQGTLVTVSS

SEQ ID NO: 674 - protein, 120 aa, synthetic construct
  VARIANT 33: note = /replace="Q" or "S" or "A"
  VARIANT 105: note = /replace="Q" or "S" or "A"
  SITE 1..120: note = /note="Variant residues given in the sequence have no preference with respect to those in the annotations for variant positions"
  REGION 1..120: note = source = /note="Description of Artificial Sequence: Synthetic polypeptide"
QVQLVQSGAEVKKPGASVKISCKASGYTFTDYNINWVRQAPGQGLEWIGYIYPYIGGSGYAQKFQGRATLTADNSTSTAYMELSSLRSEDTAVYYCAREDKTARNAMDYWGQGTLVTVSS

SEQ ID NO: 675 - protein, 96 aa, synthetic construct
  REGION 1..96: note = source = /note="Description of Artificial Sequence: Synthetic polypeptide"
DIQMTQSPSSLSASVGDRVTITCRASQSISSYLNWYQQKPGKAPKLLIYAASSLQSGVPSRFSGSGSGTDFTLTISSLQPEDFATYYCQQSYSTPP

SEQ ID NO: 676 - protein, 12 aa, synthetic construct
  REGION 1..12: note = source = /note="Description of Artificial Sequence: Synthetic peptide"
YTFGQGTKLEIK

SEQ ID NO: 677 - protein, 107 aa, synthetic construct; identical to SEQ ID NO: 82
  VARIANT 28: note = /replace="Q" or "S" or "A" or "D"
  VARIANT 32: note = /replace="Q" or "S" or "A" or "D"
  VARIANT 53: note = /replace="Q" or "S" or "A" or "D"
  VARIANT 92: note = /replace="Y" or "F" or "H"
  SITE 1..107: note = /note="Variant residues given in the sequence have no preference with respect to those in the annotations for variant positions"
  REGION 1..107: note = source = /note="Description of Artificial Sequence: Synthetic polypeptide"

SEQ ID NO: 678 - protein, 96 aa, synthetic construct; identical to SEQ ID NO: 675
  VARIANT 28: note = /replace="Q" or "A" or "D"
  VARIANT 32: note = /replace="Q" or "S" or "A" or "D"
  VARIANT 53: note = /replace="Q" or "A" or "D"
  VARIANT 92: note = /replace="F" or "H"
  SITE 1..96: note = /note="Variant residues given in the sequence have no preference with respect to those in the annotations for variant positions"
  REGION 1..96: note = source = /note="Description of Artificial Sequence: Synthetic polypeptide"

SEQ ID NO: 679 - protein, 107 aa, synthetic construct; identical to SEQ ID NO: 9
  VARIANT 28: note = /replace="Q" or "S" or "A" or "D"
  VARIANT 32: note = /replace="Q" or "S" or "A" or "D"
  VARIANT 53: note = /replace="Q" or "S" or "A" or "D"
  VARIANT 92: note = /replace="Y" or "F" or "H"
  SITE 1..107: note = /note="Variant residues given in the sequence have no preference with respect to those in the annotations for variant positions"
  REGION 1..107: note = source = /note="Description of Artificial Sequence: Synthetic polypeptide"

SEQ ID NO: 680 - protein, 107 aa, synthetic construct
  VARIANT 28: note = /replace="Q" or "S" or "A" or "D"
  VARIANT 32: note = /replace="Q" or "S" or "A" or "D"
  VARIANT 53: note = /replace="Q" or "S" or "A" or "D"
  VARIANT 92: note = /replace="Y" or "F" or "H"
  SITE 1..107: note = /note="Variant residues given in the sequence have no preference with respect to those in the annotations for variant positions"
  REGION 1..107: note = source = /note="Description of Artificial Sequence: Synthetic polypeptide"
DIQMTQSPSSLSASVGDRVTITCRVSENIYSNLAWYQQKPGKAPKLLIYEATNLAEGVPSRFSGSGSGTDYTLTISSLQPEDFATYYCQHFWGTPYTFGQGTKLEIK

SEQ ID NO: 681 - protein, 107 aa, synthetic construct
  VARIANT 28: note = /replace="Q" or "S" or "A" or "D"
  VARIANT 32: note = /replace="Q" or "S" or "A" or "D"
  VARIANT 53: note = /replace="Q" or "S" or "A" or "D"
  VARIANT 92: note = /replace="Y" or "F" or "H"
  SITE 1..107: note = /note="Variant residues given in the sequence have no preference with respect to those in the annotations for variant positions"
  REGION 1..107: note = source = /note="Description of Artificial Sequence: Synthetic polypeptide"
DIQMTQSPSSLSASVGDRVTITCRVSENIYSNLAWYQQKPGKAPKLLVYEATNLAEGVPSRFSGSGSGTDYTLTISSLQPEDFGTYYCQHFWGTPYTFGQGTKLEIK

SEQ ID NO: 682 - protein, 98 aa, synthetic construct; identical to SEQ ID NO: 667
  REGION 1..98: note = source = /note="Description of Artificial Sequence: Synthetic polypeptide"

SEQ ID NO: 683 - protein, 15 aa, synthetic construct
  REGION 1..15: note = source = /note="Description of Artificial Sequence: Synthetic peptide"
YFDYWGQGTLVTVSS

SEQ ID NO: 684 - protein, 118 aa, synthetic construct; identical to SEQ ID NO: 110
  VARIANT 57: note = /replace="Q" or "S" or "A"
  VARIANT 59: note = /replace="Q" or "S" or "A"
  VARIANT 104: note = /replace="L" or "F" or "A"
  SITE 1..118: note = /note="Variant residues given in the sequence have no preference with respect to those in the annotations for variant positions"
  REGION 1..118: note = source = /note="Description of Artificial Sequence: Synthetic polypeptide"

SEQ ID NO: 685 - protein, 98 aa, synthetic construct; identical to SEQ ID NO: 667
  VARIANT 57: note = /replace="Q" or "A"
  VARIANT 59: note = /replace="Q" or "A"
  SITE 1..98: note = /note="Variant residues given in the sequence have no preference with respect to those in the annotations for variant positions"
  REGION 1..98: note = source = /note="Description of Artificial Sequence: Synthetic polypeptide"

SEQ ID NO: 686 - protein, 118 aa, synthetic construct
  VARIANT 57: note = /replace="Q" or "S" or "A"
  VARIANT 59: note = /replace="Q" or "S" or "A"
  VARIANT 104: note = /replace="L" or "F" or "A"
  SITE 1..118: note = /note="Variant residues given in the sequence have no preference with respect to those in the annotations for variant positions"
  REGION 1..118: note = source = /note="Description of Artificial Sequence: Synthetic polypeptide"
QVQLVQSGAEVKKPGASVKVSCKASGYKFPDYVMHWVRQAPGQGLEWMGIISIYSGNTNYAQKFQGRVTMTRDTSTSTVYMELSSLRSEDTAVYYCAREGDLPMFAYWGQGTLVTVSS

SEQ ID NO: 687 - protein, 118 aa, synthetic construct
  VARIANT 57: note = /replace="Q" or "S" or "A"
  VARIANT 59: note = /replace="Q" or "S" or "A"
  VARIANT 104: note = /replace="L" or "F" or "A"
  SITE 1..118: note = /note="Variant residues given in the sequence have no preference with respect to those in the annotations for variant positions"
  REGION 1..118: note = source = /note="Description of Artificial Sequence: Synthetic polypeptide"
QVQLVQSGAEVKKPGASVKVSCKASGYKFPDYVMHWVRQAPGQGLEWIGIISIYSGNTNYAQKFQGRVTMTVDTSTSTVYMELSSLRSEDTAVYYCAREGDLPMFAYWGQGTLVTVSS

SEQ ID NO: 688 - protein, 118 aa, synthetic construct
  VARIANT 57: note = /replace="Q" or "S" or "A"
  VARIANT 59: note = /replace="Q" or "S" or "A"
  VARIANT 104: note = /replace="L" or "F" or "A"
  SITE 1..118: note = /note="Variant residues given in the sequence have no preference with respect to those in the annotations for variant positions"
  REGION 1..118: note = source = /note="Description of Artificial Sequence: Synthetic polypeptide"
QVQLVQSGAEVKKPGASVKISCKGSGYKFPDYVMHWVRQAPGQGLEWIGIISIYSGNTNYAQKFQGRATMTVDTSTSTAYMELSSLRSEDTAVYYCAREGDLPMFAYWGQGTLVTVSS

SEQ ID NO: 689 - protein, 118 aa, synthetic construct
  VARIANT 57: note = /replace="Q" or "S" or "A"
  VARIANT 59: note = /replace="Q" or "S" or "A"
  VARIANT 104: note = /replace="L" or "F" or "A"
  SITE 1..118: note = /note="Variant residues given in the sequence have no preference with respect to those in the annotations for variant positions"
  REGION 1..118: note = source = /note="Description of Artificial Sequence: Synthetic polypeptide"
QVQLVQSGAEVKKPGASVKISCKGSGYKFPDYVMHWVRQAPGQGLEWIGIISIYSGNTNYAQKFQGRATMTVDKSTSTAYMELSSLRSEDTAVYYCAREGDLPMFAYWGQGTLVTVSS

SEQ ID NO: 690 - protein, 96 aa, synthetic construct
  REGION 1..96: note = source = /note="Description of Artificial Sequence: Synthetic polypeptide"
EIVLTQSPATLSLSPGERATLSCRASQSVSSYLAWYQQKPGQAPRLLIYDASNRATGIPARFSGSGSGTDFTLTISSLEPEDFAVYYCQQRSNWPP

SEQ ID NO: 691 - protein, 12 aa, synthetic construct
  REGION 1..12: note = source = /note="Description of Artificial Sequence: Synthetic peptide"
YTFGQGTKLEIK

SEQ ID NO: 692 - protein, 106 aa, synthetic construct; identical to SEQ ID NO: 114
  VARIANT 24: note = /replace="Q" or "S" or "A" or "D"
  VARIANT 52: note = /replace="Q" or "S" or "A" or "D"
  VARIANT 90: note = /replace="Y" or "F" or "H"
  SITE 1..106: note = /note="Variant residues given in the sequence have no preference with respect to those in the annotations for variant positions"
  REGION 1..106: note = source = /note="Description of Artificial Sequence: Synthetic polypeptide"

SEQ ID NO: 693 - protein, 96 aa, synthetic construct; identical to SEQ ID NO: 690
  VARIANT 24: note = /replace="Q" or "S" or "A" or "D"
  VARIANT 53: note = /replace="Q" or "S" or "A" or "D"
  VARIANT 91: note = /replace="Y" or "F" or "H"
  SITE 1..96: note = /note="Variant residues given in the sequence have no preference with respect to those in the annotations for variant positions"
  REGION 1..96: note = source = /note="Description of Artificial Sequence: Synthetic polypeptide"

SEQ ID NO: 694 - protein, 106 aa, synthetic construct
  VARIANT 24: note = /replace="Q" or "S" or "A" or "D"
  VARIANT 52: note = /replace="Q" or "S" or "A" or "D"
  VARIANT 90: note = /replace="Y" or "F" or "H"
  SITE 1..106: note = /note="Variant residues given in the sequence have no preference with respect to those in the annotations for variant positions"
  REGION 1..106: note = source = /note="Description of Artificial Sequence: Synthetic polypeptide"
EIVLTQSPATLSLSPGERATLSCNASSSVSYMYWYQQKPGQAPRLLIYDTSNLASGIPARFSGSGSGTDFTLTISSLEPEDFAVYYCQQWSSYPLTFGQGTKLEIK

SEQ ID NO: 695 - protein, 106 aa, synthetic construct
  VARIANT 24: note = /replace="Q" or "S" or "A" or "D"
  VARIANT 52: note = /replace="Q" or "S" or "A" or "D"
  VARIANT 90: note = /replace="Y" or "F" or "H"
  SITE 1..106: note = /note="Variant residues given in the sequence have no preference with respect to those in the annotations for variant positions"
  REGION 1..106: note = source = /note="Description of Artificial Sequence: Synthetic polypeptide"
EIVLTQSPATLSLSPGERATLSCNASSSVSYMYWYQQKPGQAPRLLIYDTSNLASGIPARFSGSGSGTDYTLTISSLEPEDFAVYYCQQWSSYPLTFGQGTKLEIK

SEQ ID NO: 696 - protein, 106 aa, synthetic construct
  VARIANT 24: note = /replace="Q" or "S" or "A" or "D"
  VARIANT 52: note = /replace="Q" or "S" or "A" or "D"
  VARIANT 90: note = /replace="Y" or "F" or "H"
  SITE 1..106: note = /note="Variant residues given in the sequence have no preference with respect to those in the annotations for variant positions"
  REGION 1..106: note = source = /note="Description of Artificial Sequence: Synthetic polypeptide"
EIVLTQSPATLSLSPGERVTMSCNASSSVSYMYWYQQKPGQAPRLLIYDTSNLASGVPARFSGSGSGTDYTLTISSMEPEDFAVYYCQQWSSYPLTFGQGTKVEIK

SEQ ID NO: 697 - protein, 98 aa, synthetic construct; identical to SEQ ID NO: 667
  REGION 1..98: note = source = /note="Description of Artificial Sequence: Synthetic polypeptide"

SEQ ID NO: 698 - protein, 15 aa, synthetic construct
  REGION 1..15: note = source = /note="Description of Artificial Sequence: Synthetic peptide"
YFDYWGQGTLVTVSS

SEQ ID NO: 699 - protein, 119 aa, synthetic construct; identical to SEQ ID NO: 142
  VARIANT 31: note = /replace="Q" or "S" or "A"
  VARIANT 52: note = /replace="Q" or "S" or "A"
  VARIANT 103: note = /replace="Q" or "S" or "A"
  VARIANT 105: note = /replace="Y" or "F" or "H"
  SITE 1..119: note = /note="Variant residues given in the sequence have no preference with respect to those in the annotations for variant positions"
  REGION 1..119: note = source = /note="Description of Artificial Sequence: Synthetic polypeptide"

SEQ ID NO: 700 - protein, 98 aa, synthetic construct; identical to SEQ ID NO: 667
  VARIANT 31: note = /replace="Q" or "A"
  VARIANT 52: note = /replace="Q" or "S" or "A"
  SITE 1..98: note = /note="Variant residues given in the sequence have no preference with respect to those in the annotations for variant positions"
  REGION 1..98: note = source = /note="Description of Artificial Sequence: Synthetic polypeptide"

SEQ ID NO: 701 - protein, 119 aa, synthetic construct
  VARIANT 31: note = /replace="Q" or "S" or "A"
  VARIANT 52: note = /replace="Q" or "S" or "A"
  VARIANT 103: note = /replace="Q" or "S" or "A"
  VARIANT 105: note = /replace="Y" or "F" or "H"
  SITE 1..119: note = /note="Variant residues given in the sequence have no preference with respect to those in the annotations for variant positions"
  REGION 1..119: note = source = /note="Description of Artificial Sequence: Synthetic polypeptide"
QVQLVQSGAEVKKPGASVKVSCKASGYAFTNHLIEWVRQAPGQGLEWMGVINPGSDSTDYAQKFQGRVTMTRDTSTSTVYMELSSLRSEDTAVYYCARSLYYNSWFVYWGQGTLVTVSS

SEQ ID NO: 702 - protein, 119 aa, synthetic construct
  VARIANT 31: note = /replace="Q" or "S" or "A"
  VARIANT 52: note = /replace="Q" or "S" or "A"
  VARIANT 103: note = /replace="Q" or "S" or "A"
  VARIANT 105: note = /replace="Y" or "F" or "H"
  SITE 1..119: note = /note="Variant residues given in the sequence have no preference with respect to those in the annotations for variant positions"
  REGION 1..119: note = source = /note="Description of Artificial Sequence: Synthetic polypeptide"
QVQLVQSGAEVKKPGASVKVSCKASGYAFTNHLIEWVRQAPGQGLEWIGVINPGSDSTDYAQKFQGRVTMTADTSTSTVYMELSSLRSEDTAVYYCARSLYYNSWFVYWGQGTLVTVSS

SEQ ID NO: 703 - protein, 119 aa, synthetic construct
  VARIANT 31: note = /replace="Q" or "S" or "A"
  VARIANT 52: note = /replace="Q" or "S" or "A"
  VARIANT 103: note = /replace="Q" or "S" or "A"
  VARIANT 105: note = /replace="Y" or "F" or "H"
  SITE 1..119: note = /note="Variant residues given in the sequence have no preference with respect to those in the annotations for variant positions"
  REGION 1..119: note = source = /note="Description of Artificial Sequence: Synthetic polypeptide"
QVQLVQSGAEVKKPGASVKVSCKASGYAFTNHLIEWIRQAPGQGLEWIGVINPGSDSTDYAQKFQGRATLTADTSTSTAYMELSSLRSEDTAVYYCARSLYYNSWFVYWGQGTLVTVSS

SEQ ID NO: 704 - protein, 119 aa, synthetic construct
  VARIANT 31: note = /replace="Q" or "S" or "A"
  VARIANT 52: note = /replace="Q" or "S" or "A"
  VARIANT 103: note = /replace="Q" or "S" or "A"
  VARIANT 105: note = /replace="Y" or "F" or "H"
  SITE 1..119: note = /note="Variant residues given in the sequence have no preference with respect to those in the annotations for variant positions"
  REGION 1..119: note = source = /note="Description of Artificial Sequence: Synthetic polypeptide"
QVQLVQSGAEVKKPGASVKVSCKASGYAFTNHLIEWIRQAPGQGLEWIGVINPGSDSTDYAQKFQGRATLTADKSTSTAYMELSSLRSEDTAVYYCARSLYYNSWFVYWGQGTLVTVSS

SEQ ID NO: 705 - protein, 96 aa, synthetic construct; identical to SEQ ID NO: 675
  REGION 1..96: note = source = /note="Description of Artificial Sequence: Synthetic polypeptide"

SEQ ID NO: 706 - protein, 12 aa, synthetic construct
  REGION 1..12: note = source = /note="Description of Artificial Sequence: Synthetic peptide"
YTFGQGTKLEIK

SEQ ID NO: 707 - protein, 107 aa, synthetic construct; identical to SEQ ID NO: 146
  VARIANT 28: note = /replace="Q" or "S" or "A" or "D"
  VARIANT 50: note = /replace="Q" or "S" or "A" or "D"
  SITE 1..107: note = /note="Variant residues given in the sequence have no preference with respect to those in the annotations for variant positions"
  REGION 1..107: note = source = /note="Description of Artificial Sequence: Synthetic polypeptide"

SEQ ID NO: 708 - protein, 96 aa, synthetic construct; identical to SEQ ID NO: 675
  VARIANT 28: note = /replace="Q" or "A" or "D"
  VARIANT 50: note = /replace="Q" or "S" or "A" or "D"
  SITE 1..96: note = /note="Variant residues given in the sequence have no preference with respect to those in the annotations for variant positions"
  REGION 1..96: note = source = /note="Description of Artificial Sequence: Synthetic polypeptide"

SEQ ID NO: 709 - protein, 107 aa, synthetic construct
  VARIANT 28: note = /replace="Q" or "S" or "A" or "D"
  VARIANT 50: note = /replace="Q" or "S" or "A" or "D"
  SITE 1..107: note = /note="Variant residues given in the sequence have no preference with respect to those in the annotations for variant positions"
  REGION 1..107: note = source = /note="Description of Artificial Sequence: Synthetic polypeptide"
DIQMTQSPSSLSASVGDRVTITCRASENIYSYLAWYQQKPGKAPKLLIYNAKTLVEGVPSRFSGSGSGTDFTLTISSLQPEDFATYYCQHHYGTPYTFGQGTKLEIK

SEQ ID NO: 710 - protein, 107 aa, synthetic construct
  VARIANT 28: note = /replace="Q" or "S" or "A" or "D"
  VARIANT 50: note = /replace="Q" or "S" or "A" or "D"
  SITE 1..107: note = /note="Variant residues given in the sequence have no preference with respect to those in the annotations for variant positions"
  REGION 1..107: note = source = /note="Description of Artificial Sequence: Synthetic polypeptide"
DIQMTQSPSSLSASVGDRVTITCRASENIYSYLAWYQQKPGKAPKLLVYNAKTLVEGVPSRFSGSGSGTDFTLTISSLQPEDFGTYYCQHHYGTPYTFGQGTKLEIK

SEQ ID NO: 711 - protein, 98 aa, synthetic construct; identical to SEQ ID NO: 667
  REGION 1..98: note = source = /note="Description of Artificial Sequence: Synthetic polypeptide"

SEQ ID NO: 712 - protein, 15 aa, synthetic construct
  REGION 1..15: note = source = /note="Description of Artificial Sequence: Synthetic peptide"
YFDYWGQGTLVTVSS

SEQ ID NO: 713 - protein, 119 aa, synthetic construct; identical to SEQ ID NO: 174
  VARIANT 31: note = /replace="Q" or "S" or "A"
  VARIANT 52: note = /replace="Q" or "S" or "A"
  VARIANT 105: note = /replace="Y" or "F" or "H"
  SITE 1..119: note = /note="Variant residues given in the sequence have no preference with respect to those in the annotations for variant positions"
  REGION 1..119: note = source = /note="Description of Artificial Sequence: Synthetic polypeptide"

SEQ ID NO: 714 - protein, 98 aa, synthetic construct; identical to SEQ ID NO: 667
  VARIANT 31: note = /replace="Q" or "A"
  VARIANT 52: note = /replace="Q" or "S" or "A"
  SITE 1..98: note = /note="Variant residues given in the sequence have no preference with respect to those in the annotations for variant positions"
  REGION 1..98: note = source = /note="Description of Artificial Sequence: Synthetic polypeptide"

SEQ ID NO: 715 - protein, 119 aa, synthetic construct
  VARIANT 31: note = /replace="Q" or "S" or "A"
  VARIANT 52: note = /replace="Q" or "S" or "A"
  VARIANT 105: note = /replace="Y" or "F" or "H"
  SITE 1..119: note = /note="Variant residues given in the sequence have no preference with respect to those in the annotations for variant positions"
  REGION 1..119: note = source = /note="Description of Artificial Sequence: Synthetic polypeptide"
QVQLVQSGAEVKKPGASVKVSCKASGYAFTNYLIEWVRQAPGQGLEWMGVINPGSGGIYYAQKFQGRVTMTRDTSTSTVYMELSSLRSEDTAVYYCARSETHDTWFAYWGQGTLVTVSS

SEQ ID NO: 716 - protein, 119 aa, synthetic construct; identical to SEQ ID NO: 262
  VARIANT 31: note = /replace="Q" or "S" or "A"
  VARIANT 52: note = /replace="Q" or "S" or "A"
  VARIANT 105: note = /replace="Y" or "F" or "H"
  SITE 1..119: note = /note="Variant residues given in the sequence have no preference with respect to those in the annotations for variant positions"
  REGION 1..119: note = source = /note="Description of Artificial Sequence: Synthetic polypeptide"

SEQ ID NO: 717 - protein, 119 aa, synthetic construct
  VARIANT 31: note = /replace="Q" or "S" or "A"
  VARIANT 52: note = /replace="Q" or "S" or "A"
  VARIANT 105: note = /replace="Y" or "F" or "H"
  SITE 1..119: note = /note="Variant residues given in the sequence have no preference with respect to those in the annotations for variant positions"
  REGION 1..119: note = source = /note="Description of Artificial Sequence: Synthetic polypeptide"
QVQLVQSGAEVKKPGASVKVSCKTSGYAFTNYLIEWVRQAPGQGLEWIGVINPGSGGIYYAQKFQGRVTLTADTSTSTAYMELSSLRSEDTAVYYCARSETHDTWFAYWGQGTLVTVSS

SEQ ID NO: 718 - protein, 119 aa, synthetic construct
  VARIANT 31: note = /replace="Q" or "S" or "A"
  VARIANT 52: note = /replace="Q" or "S" or "A"
  VARIANT 105: note = /replace="Y" or "F" or "H"
  SITE 1..119: note = /note="Variant residues given in the sequence have no preference with respect to those in the annotations for variant positions"
  REGION 1..119: note = source = /note="Description of Artificial Sequence: Synthetic polypeptide"
QVQLVQSGAEVKKPGASVKVSCKTSGYAFTNYLIEWVRQAPGQGLEWIGVINPGSGGIYYAQKFQGRVTLTADKSTSTAYMELSSLRSEDTAVYYCARSETHDTWFAYWGQGTLVTVSS

SEQ ID NO: 719 - protein, 96 aa, synthetic construct; identical to SEQ ID NO: 675
  REGION 1..96: note = source = /note="Description of Artificial Sequence: Synthetic polypeptide"

SEQ ID NO: 720 - protein, 12 aa, synthetic construct
  REGION 1..12: note = source = /note="Description of Artificial Sequence: Synthetic peptide"
YTFGQGTKLEIK

SEQ ID NO: 721 - protein, 96 aa, synthetic construct
  REGION 1..96: note = source = /note="Description of Artificial Sequence: Synthetic polypeptide"
DIQMTQSPSSLSASVGDRVTITCRASQGIRNDLGWYQQKPGKAPKRLIYAASSLQSGVPSRFSGSGSGTEFTLTISNLQPEDFATYYCLQHNSYPP

SEQ ID NO: 722 - protein, 107 aa, synthetic construct
  VARIANT 92: note = /replace="Y" or "F" or "H"
  VARIANT 93: note = /replace="Q" or "S" or "A" or "D"
  SITE 1..107: note = /note="Variant residues given in the sequence have no preference with respect to those in the annotations for variant positions"
  REGION 1..107: note = source = /note="Description of Artificial Sequence: Synthetic polypeptide"
DIVMTQSQKFISTSVGDRVSITCKASQSVRIAVAWFQQKPGQSPKALIYLASTRHTGVPDRFTGSGSGTDFTLTISNVQSEDLADYFCLQHWNYPYTFGGGTKLEIK

SEQ ID NO: 723 - protein, 96 aa, synthetic construct; identical to SEQ ID NO: 675
  VARIANT 92: note = /replace="F" or "H"
  VARIANT 93: note = /replace="Q" or "A" or "D"
  SITE 1..96: note = /note="Variant residues given in the sequence have no preference with respect to those in the annotations for variant positions"
  REGION 1..96: note = source = /note="Description of Artificial Sequence: Synthetic polypeptide"

SEQ ID NO: 724 - protein, 107 aa, synthetic construct
  VARIANT 92: note = /replace="Y" or "F" or "H"
  VARIANT 93: note = /replace="Q" or "S" or "A" or "D"
  SITE 1..107: note = /note="Variant residues given in the sequence have no preference with respect to those in the annotations for variant positions"
  REGION 1..107: note = source = /note="Description of Artificial Sequence: Synthetic polypeptide"
DIQMTQSPSSLSASVGDRVTITCKASQSVRIAVAWYQQKPGKAPKLLIYLASTRHTGVPSRFSGSGSGTDFTLTISSLQPEDFATYYCLQHWNYPYTFGQGTKLEIK

SEQ ID NO: 725 - protein, 107 aa, synthetic construct; identical to SEQ ID NO: 267
  VARIANT 92: note = /replace="Y" or "F" or "H"
  VARIANT 93: note = /replace="Q" or "S" or "A" or "D"
  SITE 1..107: note = /note="Variant residues given in the sequence have no preference with respect to those in the annotations for variant positions"
  REGION 1..107: note = source = /note="Description of Artificial Sequence: Synthetic polypeptide"

SEQ ID NO: 726 - protein, 98 aa, synthetic construct; identical to SEQ ID NO: 667
  REGION 1..98: note = source = /note="Description of Artificial Sequence: Synthetic polypeptide"

SEQ ID NO: 727 - protein, 15 aa, synthetic construct
  REGION 1..15: note = source = /note="Description of Artificial Sequence: Synthetic peptide"
YFDYWGQGTLVTVSS

SEQ ID NO: 728 - protein, 120 aa, synthetic construct; identical to SEQ ID NO: 182
  VARIANT 31: note = /replace="Q" or "S" or "A"
  VARIANT 33: note = /replace="Y" or "F" or "H"
  VARIANT 59: note = /replace="Q" or "S" or "A"
  SITE 1..120: note = /note="Variant residues given in the sequence have no preference with respect to those in the annotations for variant positions"
  REGION 1..120: note = source = /note="Description of Artificial Sequence: Synthetic polypeptide"

SEQ ID NO: 729 - protein, 98 aa, synthetic construct; identical to SEQ ID NO: 667
  VARIANT 31: note = /replace="Q" or "A"
  VARIANT 33: note = /replace="F" or "H"
  VARIANT 59: note = /replace="Q" or "A"
  SITE 1..98: note = /note="Variant residues given in the sequence have no preference with respect to those in the annotations for variant positions"
  REGION 1..98: note = source = /note="Description of Artificial Sequence: Synthetic polypeptide"

SEQ ID NO: 730 - protein, 120 aa, synthetic construct
  VARIANT 31: note = /replace="Q" or "S" or "A"
  VARIANT 33: note = /replace="Y" or "F" or "H"
  VARIANT 59: note = /replace="Q" or "S" or "A"
  SITE 1..120: note = /note="Variant residues given in the sequence have no preference with respect to those in the annotations for variant positions"
  REGION 1..120: note = source = /note="Description of Artificial Sequence: Synthetic polypeptide"
QVQLVQSGAEVKKPGASVKVSCKASGYTFTNYWIGWVRQAPGQGLEWMGDIYPGGGYTNYAQKFQGRVTMTRDTSTSTVYMELSSLRSEDTAVYYCARPYYGSSYGFAFWGQGTLVTVSS

SEQ ID NO: 731 - protein, 120 aa, synthetic construct
  VARIANT 31: note = /replace="Q" or "S" or "A"
  VARIANT 33: note = /replace="Y" or "F" or "H"
  VARIANT 59: note = /replace="Q" or "S" or "A"
  SITE 1..120: note = /note="Variant residues given in the sequence have no preference with respect to those in the annotations for variant positions"
  REGION 1..120: note = source = /note="Description of Artificial Sequence: Synthetic polypeptide"
QVQLVQSGAEVKKPGASVKVSCKASGYTFTNYWIGWVRQAPGQGLEWIGDIYPGGGYTNYAQKFQGRVTMTADTSTSTVYMELSSLRSEDTAVYYCASPYYGSSYGFAFWGQGTLVTVSS

SEQ ID NO: 732 - protein, 120 aa, synthetic construct
  VARIANT 31: note = /replace="Q" or "S" or "A"
  VARIANT 33: note = /replace="Y" or "F" or "H"
  VARIANT 59: note = /replace="Q" or "S" or "A"
  SITE 1..120: note = /note="Variant residues given in the sequence have no preference with respect to those in the annotations for variant positions"
  REGION 1..120: note = source = /note="Description of Artificial Sequence: Synthetic polypeptide"
QVQLVQSGAEVKKPGASVKMSCKASGYTFTNYWIGWVRQAPGQGLEWIGDIYPGGGYTNYAQKFQGRATLTADTSTSTAYMELSSLRSEDTAVYYCASPYYGSSYGFAFWGQGTLVTVSS

SEQ ID NO: 733 - protein, 120 aa, synthetic construct; identical to SEQ ID NO: 4
  REGION 1..120: note = source = /note="Description of Artificial Sequence: Synthetic polypeptide"

SEQ ID NO: 734 - protein, 120 aa, synthetic construct; identical to SEQ ID NO: 672
  REGION 1..120: note = source = /note="Description of Artificial Sequence: Synthetic polypeptide"

SEQ ID NO: 735 - protein, 120 aa, synthetic construct; identical to SEQ ID NO: 673
  REGION 1..120: note = source = /note="Description of Artificial Sequence: Synthetic polypeptide"

SEQ ID NO: 736 - protein, 120 aa, synthetic construct; identical to SEQ ID NO: 674
  REGION 1..120: note = source = /note="Description of Artificial Sequence: Synthetic polypeptide"

SEQ ID NO: 737 - protein, 118 aa, synthetic construct; identical to SEQ ID NO: 686
  REGION 1..118: note = source = /note="Description of Artificial Sequence: Synthetic polypeptide"

SEQ ID NO: 738 - protein, 118 aa, synthetic construct; identical to SEQ ID NO: 687
  REGION 1..118: note = source = /note="Description of Artificial Sequence: Synthetic polypeptide"

SEQ ID NO: 739 - protein, 118 aa, synthetic construct; identical to SEQ ID NO: 688
  REGION 1..118: note = source = /note="Description of Artificial Sequence: Synthetic polypeptide"

SEQ ID NO: 740 - protein, 118 aa, synthetic construct; identical to SEQ ID NO: 689
  REGION 1..118: note = source = /note="Description of Artificial Sequence: Synthetic polypeptide"

SEQ ID NO: 741 - protein, 119 aa, synthetic construct; identical to SEQ ID NO: 701
  REGION 1..119: note = source = /note="Description of Artificial Sequence: Synthetic polypeptide"

SEQ ID NO: 742 - protein, 119 aa, synthetic construct; identical to SEQ ID NO: 702
  REGION 1..119: note = source = /note="Description of Artificial Sequence: Synthetic polypeptide"

SEQ ID NO: 743 - protein, 119 aa, synthetic construct; identical to SEQ ID NO: 703
  REGION 1..119: note = source = /note="Description of Artificial Sequence: Synthetic polypeptide"

SEQ ID NO: 744 - protein, 119 aa, synthetic construct; identical to SEQ ID NO: 704
  REGION 1..119: note = source = /note="Description of Artificial Sequence: Synthetic polypeptide"

SEQ ID NO: 745 - protein, 119 aa, synthetic construct; identical to SEQ ID NO: 715
  REGION 1..119: note = source = /note="Description of Artificial Sequence: Synthetic polypeptide"

SEQ ID NO: 746 - protein, 119 aa, synthetic construct; identical to SEQ ID NO: 262
  REGION 1..119: note = source = /note="Description of Artificial Sequence: Synthetic polypeptide"

SEQ ID NO: 747 - protein, 119 aa, synthetic construct; identical to SEQ ID NO: 717
  REGION 1..119: note = source = /note="Description of Artificial Sequence: Synthetic polypeptide"

SEQ ID NO: 748 - protein, 119 aa, synthetic construct; identical to SEQ ID NO: 718
  REGION 1..119: note = source = /note="Description of Artificial Sequence: Synthetic polypeptide"

SEQ ID NO: 749 - protein, 120 aa, synthetic construct; identical to SEQ ID NO: 730
  REGION 1..120: note = source = /note="Description of Artificial Sequence: Synthetic polypeptide"

SEQ ID NO: 750 - protein, 120 aa, synthetic construct; identical to SEQ ID NO: 731
  REGION 1..120: note = source = /note="Description of Artificial Sequence: Synthetic polypeptide"

SEQ ID NO: 751 - protein, 120 aa, synthetic construct; identical to SEQ ID NO: 732
  REGION 1..120: note = source = /note="Description of Artificial Sequence: Synthetic polypeptide"

SEQ ID NO: 752 - protein, 107 aa, synthetic construct; identical to SEQ ID NO: 9
  REGION 1..107: note = source = /note="Description of Artificial Sequence: Synthetic polypeptide"

SEQ ID NO: 753 - protein, 107 aa, synthetic construct; identical to SEQ ID NO: 680
  REGION 1..107: note = source = /note="Description of Artificial Sequence: Synthetic polypeptide"

SEQ ID NO: 754 - protein, 107 aa, synthetic construct; identical to SEQ ID NO: 681
  REGION 1..107: note = source = /note="Description of Artificial Sequence: Synthetic polypeptide"

SEQ ID NO: 755 - protein, 106 aa, synthetic construct; identical to SEQ ID NO: 694
  REGION 1..106: note = source = /note="Description of Artificial Sequence: Synthetic polypeptide"

SEQ ID NO: 756 - protein, 106 aa, synthetic construct; identical to SEQ ID NO: 695
  REGION 1..106: note = source = /note="Description of Artificial Sequence: Synthetic polypeptide"

SEQ ID NO: 757 - protein, 106 aa, synthetic construct; identical to SEQ ID NO: 696
  REGION 1..106: note = source = /note="Description of Artificial Sequence: Synthetic polypeptide"

SEQ ID NO: 758 - protein, 107 aa, synthetic construct; identical to SEQ ID NO: 709
  REGION 1..107: note = source = /note="Description of Artificial Sequence: Synthetic polypeptide"

SEQ ID NO: 759 - protein, 107 aa, synthetic construct; identical to SEQ ID NO: 710
  REGION 1..107: note = source = /note="Description of Artificial Sequence: Synthetic polypeptide"

SEQ ID NO: 760 - protein, 107 aa, synthetic construct; identical to SEQ ID NO: 724
  REGION 1..107: note = source = /note="Description of Artificial Sequence: Synthetic polypeptide"

SEQ ID NO: 761 - protein, 107 aa, synthetic construct; identical to SEQ ID NO: 267
  REGION 1..107: note = source = /note="Description of Artificial Sequence: Synthetic polypeptide"

SEQ ID NO: 762 - protein, 98 aa, synthetic construct; identical to SEQ ID NO: 667
  REGION 1..98: note = source = /note="Description of Artificial Sequence: Synthetic polypeptide"

SEQ ID NO: 763 - protein, 15 aa, synthetic construct
  REGION 1..15: note = source = /note="Description of Artificial Sequence: Synthetic peptide"
YFDYWGQGTLVTVSS

SEQ ID NO: 764 - protein, 120 aa, synthetic construct; identical to SEQ ID NO: 78
  VARIANT 33: note = /replace="Q" or "S" or "A"
  VARIANT 105: note = /replace="Q" or "S" or "A"
  SITE 1..120: note = /note="Variant residues given in the sequence have no preference with respect to those in the annotations for variant positions"
  REGION 1..120: note = source = /note="Description of Artificial Sequence: Synthetic polypeptide"

SEQ ID NO: 765 - protein, 98 aa, synthetic construct; identical to SEQ ID NO: 667
  VARIANT 33: note = /replace="Q" or "S" or "A"
  SITE 1..98: note = /note="Variant residues given in the sequence have no preference with respect to those in the annotations for variant positions"
  REGION 1..98: note = source = /note="Description of Artificial Sequence: Synthetic polypeptide"

SEQ ID NO: 766 - protein, 120 aa, synthetic construct; identical to SEQ ID NO: 4
  VARIANT 33: note = /replace="Q" or "S" or "A"
  VARIANT 105: note = /replace="Q" or "S" or "A"
  SITE 1..120: note = /note="Variant residues given in the sequence have no preference with respect to those in the annotations for variant positions"
  REGION 1..120: note = source = /note="Description of Artificial Sequence: Synthetic polypeptide"

SEQ ID NO: 767 - protein, 120 aa, synthetic construct; identical to SEQ ID NO: 672
  VARIANT 33: note = /replace="Q" or "S" or "A"
  VARIANT 105: note = /replace="Q" or "S" or "A"
  SITE 1..120: note = /note="Variant residues given in the sequence have no preference with respect to those in the annotations for variant positions"
  REGION 1..120: note = source = /note="Description of Artificial Sequence: Synthetic polypeptide"

SEQ ID NO: 768 - protein, 120 aa, synthetic construct; identical to SEQ ID NO: 673
  VARIANT 33: note = /replace="Q" or "S" or "A"
  VARIANT 105: note = /replace="Q" or "S" or "A"
  SITE 1..120: note = /note="Variant residues given in the sequence have no preference with respect to those in the annotations for variant positions"
  REGION 1..120: note = source = /note="Description of Artificial Sequence: Synthetic polypeptide"

SEQ ID NO: 769 - protein, 120 aa, synthetic construct; identical to SEQ ID NO: 674
  VARIANT 33: note = /replace="Q" or "S" or "A"
  VARIANT 105: note = /replace="Q" or "S" or "A"
  SITE 1..120: note = /note="Variant residues given in the sequence have no preference with respect to those in the annotations for variant positions"
  REGION 1..120: note = source = /note="Description of Artificial Sequence: Synthetic polypeptide"

SEQ ID NO: 770 - protein, 96 aa, synthetic construct; identical to SEQ ID NO: 675
  REGION 1..96: note = source = /note="Description of Artificial Sequence: Synthetic polypeptide"

SEQ ID NO: 771 - protein, 12 aa, synthetic construct
  REGION 1..12: note = source = /note="Description of Artificial Sequence: Synthetic peptide"
YTFGQGTKLEIK

SEQ ID NO: 772 - protein, 107 aa, synthetic construct; identical to SEQ ID NO: 82
  VARIANT 28: note = /replace="Q" or "S" or "A" or "D"
  VARIANT 32: note = /replace="Q" or "S" or "A" or "D"
  VARIANT 53: note = /replace="Q" or "S" or "A" or "D"
  VARIANT 92: note = /replace="Y" or "F" or "H"
  SITE 1..107: note = /note="Variant residues given in the sequence have no preference with respect to those in the annotations for variant positions"
  REGION 1..107: note = source = /note="Description of Artificial Sequence: Synthetic polypeptide"

SEQ ID NO: 773 - protein, 96 aa, synthetic construct; identical to SEQ ID NO: 675
  VARIANT 28: note = /replace="Q" or "A" or "D"
  VARIANT 32: note = /replace="Q" or "S" or "A" or "D"
  VARIANT 53: note = /replace="Q" or "A" or "D"
  VARIANT 92: note = /replace="F" or "H"
  SITE 1..96: note = /note="Variant residues given in the sequence have no preference with respect to those in the annotations for variant positions"
  REGION 1..96: note = source = /note="Description of Artificial Sequence: Synthetic polypeptide"

SEQ ID NO: 774 - protein, 107 aa, synthetic construct; identical to SEQ ID NO: 9
  VARIANT 28: note = /replace="Q" or "S" or "A" or "D"
  VARIANT 32: note = /replace="Q" or "S" or "A" or "D"
  VARIANT 53: note = /replace="Q" or "S" or "A" or "D"
  VARIANT 92: note = /replace="Y" or "F" or "H"
  SITE 1..107: note = /note="Variant residues given in the sequence have no preference with respect to those in the annotations for variant positions"
  REGION 1..107: note = source = /note="Description of Artificial Sequence: Synthetic polypeptide"

SEQ ID NO: 775 - protein, 107 aa, synthetic construct; identical to SEQ ID NO: 680
  VARIANT 28: note = /replace="Q" or "S" or "A" or "D"
  VARIANT 32: note = /replace="Q" or "S" or "A" or "D"
  VARIANT 53: note = /replace="Q" or "S" or "A" or "D"
  VARIANT 92: note = /replace="Y" or "F" or "H"
  SITE 1..107: note = /note="Variant residues given in the sequence have no preference with respect to those in the annotations for variant positions"
  REGION 1..107: note = source = /note="Description of Artificial Sequence: Synthetic polypeptide"

SEQ ID NO: 776 - protein, 107 aa, synthetic construct; identical to SEQ ID NO: 681
  VARIANT 28: note = /replace="Q" or "S" or "A" or "D"
  VARIANT 32: note = /replace="Q" or "S" or "A" or "D"
  VARIANT 53: note = /replace="Q" or "S" or "A" or "D"
  VARIANT 92: note = /replace="Y" or "F" or "H"
  SITE 1..107: note = /note="Variant residues given in the sequence have no preference with respect to those in the annotations for variant positions"
  REGION 1..107: note = source = /note="Description of Artificial Sequence: Synthetic polypeptide"

SEQ ID NO: 777 - protein, 98 aa, synthetic construct; identical to SEQ ID NO: 667
  REGION 1..98: note = source = /note="Description of Artificial Sequence: Synthetic polypeptide"

SEQ ID NO: 778 - protein, 15 aa, synthetic construct
  REGION 1..15: note = source = /note="Description of Artificial Sequence: Synthetic peptide"
YFDYWGQGTLVTVSS

SEQ ID NO: 779 - protein, 119 aa, synthetic construct; identical to SEQ ID NO: 174
  VARIANT 31: note = /replace="Q" or "S" or "A"
  VARIANT 52: note = /replace="Q" or "S" or "A"
  VARIANT 105: note = /replace="Y" or "F" or "H"
  SITE 1..119: note = /note="Variant residues given in the sequence have no preference with respect to those in the annotations for variant positions"
  REGION 1..119: note = source = /note="Description of Artificial Sequence: Synthetic polypeptide"

SEQ ID NO: 780 - protein, 98 aa, synthetic construct; identical to SEQ ID NO: 667
  VARIANT 31: note = /replace="Q" or "A"
  VARIANT 52: note = /replace="Q" or "S" or "A"
  SITE 1..98: note = /note="Variant residues given in the sequence have no preference with respect to those in the annotations for variant positions"
  REGION 1..98: note = source = /note="Description of Artificial Sequence: Synthetic polypeptide"

SEQ ID NO: 781 - protein, 119 aa, synthetic construct; identical to SEQ ID NO: 715
  VARIANT 31: note = /replace="Q" or "S" or "A"
  VARIANT 52: note = /replace="Q" or "S" or "A"
  VARIANT 105: note = /replace="Y" or "F" or "H"
  SITE 1..119: note = /note="Variant residues given in the sequence have no preference with respect to those in the annotations for variant positions"
  REGION 1..119: note = source = /note="Description of Artificial Sequence: Synthetic polypeptide"

SEQ ID NO: 782 - protein, 119 aa, synthetic construct; identical to SEQ ID NO: 262
  VARIANT 31: note = /replace="Q" or "S" or "A"
  VARIANT 52: note = /replace="Q" or "S" or "A"
  VARIANT 105: note = /replace="Y" or "F" or "H"
  SITE 1..119: note = /note="Variant residues given in the sequence have no preference with respect to those in the annotations for variant positions"
  REGION 1..119: note = source = /note="Description of Artificial Sequence: Synthetic polypeptide"

SEQ ID NO: 783 - protein, 119 aa, synthetic construct; identical to SEQ ID NO: 717
  VARIANT 31: note = /replace="Q" or "S" or "A"
  VARIANT 52: note = /replace="Q" or "S" or "A"
  VARIANT 105: note = /replace="Y" or "F" or "H"
  SITE 1..119: note = /note="Variant residues given in the sequence have no preference with respect to those in the annotations for variant positions"
  REGION 1..119: note = source = /note="Description of Artificial Sequence: Synthetic polypeptide"

SEQ ID NO: 784 - protein, 119 aa, synthetic construct; identical to SEQ ID NO: 718
  VARIANT 31: note = /replace="Q" or "S" or "A"
  VARIANT 52: note = /replace="Q" or "S" or "A"
  VARIANT 105: note = /replace="Y" or "F" or "H"
  SITE 1..119: note = /note="Variant residues given in the sequence have no preference with respect to those in the annotations for variant positions"
  REGION 1..119: note = source = /note="Description of Artificial Sequence: Synthetic polypeptide"

SEQ ID NO: 785 - protein, 96 aa, synthetic construct; identical to SEQ ID NO: 675
  REGION 1..96: note = source = /note="Description of Artificial Sequence: Synthetic polypeptide"

SEQ ID NO: 786 - protein, 12 aa, synthetic construct
  REGION 1..12: note = source = /note="Description of Artificial Sequence: Synthetic peptide"
YTFGQGTKLEIK

SEQ ID NO: 787 - protein, 96 aa, synthetic construct; identical to SEQ ID NO: 721
  REGION 1..96: note = source = /note="Description of Artificial Sequence: Synthetic polypeptide"

SEQ ID NO: 788 - protein, 107 aa, synthetic construct; identical to SEQ ID NO: 722
  VARIANT 92: note = /replace="Y" or "F" or "H"
  VARIANT 93: note = /replace="Q" or "S" or "A" or "D"
  SITE 1..107: note = /note="Variant residues given in the sequence have no preference with respect to those in the annotations for variant positions"
  REGION 1..107: note = source = /note="Description of Artificial Sequence: Synthetic polypeptide"

SEQ ID NO: 789 - protein, 96 aa, synthetic construct; identical to SEQ ID NO: 675
  VARIANT 92: note = /replace="F" or "H"
  VARIANT 93: note = /replace="Q" or "A" or "D"
  SITE 1..96: note = /note="Variant residues given in the sequence have no preference with respect to those in the annotations for variant positions"
  REGION 1..96: note = source = /note="Description of Artificial Sequence: Synthetic polypeptide"

SEQ ID NO: 790 - protein, 107 aa, synthetic construct; identical to SEQ ID NO: 724
  VARIANT 92: note = /replace="Y" or "F" or "H"
  VARIANT 93: note = /replace="Q" or "S" or "A" or "D"
  SITE 1..107: note = /note="Variant residues given in the sequence have no preference with respect to those in the annotations for variant positions"
  REGION 1..107: note = source = /note="Description of Artificial Sequence: Synthetic polypeptide"

SEQ ID NO: 791 - protein, 107 aa, synthetic construct; identical to SEQ ID NO: 267
  VARIANT 92: note = /replace="Y" or "F" or "H"
  VARIANT 93: note = /replace="Q" or "S" or "A" or "D"
  SITE 1..107: note = /note="Variant residues given in the sequence have no preference with respect to those in the annotations for variant positions"
  REGION 1..107: note = source = /note="Description of Artificial Sequence: Synthetic polypeptide"

SEQ ID NO: 792 - protein, 98 aa, synthetic construct; identical to SEQ ID NO: 667
  REGION 1..98: note = source = /note="Description of Artificial Sequence: Synthetic polypeptide"

SEQ ID NO: 793 - protein, 15 aa, synthetic construct
  REGION 1..15: note = source = /note="Description of Artificial Sequence: Synthetic peptide"
YFDYWGQGTLVTVSS

SEQ ID NO: 794 - protein, 120 aa, synthetic construct; identical to SEQ ID NO: 182
  VARIANT 31: note = /replace="Q" or "S" or "A"
  VARIANT 33: note = /replace="Y" or "F" or "H"
  VARIANT 59: note = /replace="Q" or "S" or "A"
  SITE 1..120: note = /note="Variant residues given in the sequence have no preference with respect to those in the annotations for variant positions"
  REGION 1..120: note = source = /note="Description of Artificial Sequence: Synthetic polypeptide"

SEQ ID NO: 795 - protein, 98 aa, synthetic construct; identical to SEQ ID NO: 667
  VARIANT 31: note = /replace="Q" or "A"
  VARIANT 33: note = /replace="F" or "H"
  VARIANT 59: note = /replace="Q" or "A"
  SITE 1..98: note = /note="Variant residues given in the sequence have no preference with respect to those in the annotations for variant positions"
  REGION 1..98: note = source = /note="Description of Artificial Sequence: Synthetic polypeptide"

SEQ ID NO: 796 - protein, 120 aa, synthetic construct; identical to SEQ ID NO: 730
  VARIANT 31: note = /replace="Q" or "S" or "A"
  VARIANT 33: note = /replace="Y" or "F" or "H"
  VARIANT 59: note = /replace="Q" or "S" or "A"
  SITE 1..120: note = /note="Variant residues given in the sequence have no preference with respect to those in the annotations for variant positions"
  REGION 1..120: note = source = /note="Description of Artificial Sequence: Synthetic polypeptide"

SEQ ID NO: 797 - protein, 120 aa, synthetic construct; identical to SEQ ID NO: 731
  VARIANT 31: note = /replace="Q" or "S" or "A"
  VARIANT 33: note = /replace="Y" or "F" or "H"
  VARIANT 59: note = /replace="Q" or "S" or "A"
  SITE 1..120: note = /note="Variant residues given in the sequence have no preference with respect to those in the annotations for variant positions"
  REGION 1..120: note = source = /note="Description of Artificial Sequence: Synthetic polypeptide"

SEQ ID NO: 798 - protein, 120 aa, synthetic construct; identical to SEQ ID NO: 732
  VARIANT 31: note = /replace="Q" or "S" or "A"
  VARIANT 33: note = /replace="Y" or "F" or "H"
  VARIANT 59: note = /replace="Q" or "S" or "A"
  SITE 1..120: note = /note="Variant residues given in the sequence have no preference with respect to those in the annotations for variant positions"
  REGION 1..120: note = source = /note="Description of Artificial Sequence: Synthetic polypeptide"

SEQ ID NO: 799 - protein, 120 aa, synthetic construct; identical to SEQ ID NO: 4
  REGION 1..120: note = source = /note="Description of Artificial Sequence: Synthetic polypeptide"

SEQ ID NO: 800 - protein, 120 aa, synthetic construct; identical to SEQ ID NO: 672
  REGION 1..120: note = source = /note="Description of Artificial Sequence: Synthetic polypeptide"

SEQ ID NO: 801 - protein, 120 aa, synthetic construct; identical to SEQ ID NO: 673
  REGION 1..120: note = source = /note="Description of Artificial Sequence: Synthetic polypeptide"

SEQ ID NO: 802 - protein, 120 aa, synthetic construct; identical to SEQ ID NO: 674
  REGION 1..120: note = source = /note="Description of Artificial Sequence: Synthetic polypeptide"

SEQ ID NO: 803 - protein, 107 aa, synthetic construct; identical to SEQ ID NO: 9
  REGION 1..107: note = source = /note="Description of Artificial Sequence: Synthetic polypeptide"

SEQ ID NO: 804 - protein, 107 aa, synthetic construct; identical to SEQ ID NO: 680
  REGION 1..107: note = source = /note="Description of Artificial Sequence: Synthetic polypeptide"

SEQ ID NO: 805 - protein, 107 aa, synthetic construct; identical to SEQ ID NO: 681
  REGION 1..107: note = source = /note="Description of Artificial Sequence: Synthetic polypeptide"

SEQ ID NO: 806 - protein, 119 aa, synthetic construct; identical to SEQ ID NO: 715
  REGION 1..119: note = source = /note="Description of Artificial Sequence: Synthetic polypeptide"

SEQ ID NO: 807 - protein, 119 aa, synthetic construct; identical to SEQ ID NO: 262
  REGION 1..119: note = source = /note="Description of Artificial Sequence: Synthetic polypeptide"

SEQ ID NO: 808 - protein, 119 aa, synthetic construct; identical to SEQ ID NO: 717
  REGION 1..119: note = source = /note="Description of Artificial Sequence: Synthetic polypeptide"

SEQ ID NO: 809 - protein, 119 aa, synthetic construct; identical to SEQ ID NO: 718
  REGION 1..119: note = source = /note="Description of Artificial Sequence: Synthetic polypeptide"

SEQ ID NO: 810 - protein, 107 aa, synthetic construct; identical to SEQ ID NO: 724
  REGION 1..107: note = source = /note="Description of Artificial Sequence: Synthetic polypeptide"

SEQ ID NO: 811 - protein, 107 aa, synthetic construct; identical to SEQ ID NO: 267
  REGION 1..107: note = source = /note="Description of Artificial Sequence: Synthetic polypeptide"

SEQ ID NO: 812 - protein, 120 aa, synthetic construct; identical to SEQ ID NO: 730
  REGION 1..120: note = source = /note="Description of Artificial Sequence: Synthetic polypeptide"

SEQ ID NO: 813 - protein, 120 aa, synthetic construct; identical to SEQ ID NO: 731
  REGION 1..120: note = source = /note="Description of Artificial Sequence: Synthetic polypeptide"

SEQ ID NO: 814 - protein, 120 aa, synthetic construct; identical to SEQ ID NO: 732
  REGION 1..120: note = source = /note="Description of Artificial Sequence: Synthetic polypeptide"

SEQ ID NO: 815 - protein, 107 aa, synthetic construct; identical to SEQ ID NO: 724
  REGION 1..107: note = source = /note="Description of Artificial Sequence: Synthetic polypeptide"

SEQ ID NO: 816 - protein, 107 aa, synthetic construct; identical to SEQ ID NO: 267
  REGION 1..107: note = source = /note="Description of Artificial Sequence: Synthetic polypeptide"

SEQ ID NO: 817 - protein, 121 aa, synthetic construct
  REGION 1..121: note = source = /note="Description of Artificial Sequence: Synthetic polypeptide"
QVQLVESGGGLVQPGGSLRLSCAASGFTFSSYGMHWVRQAPGKGLEWVAFIRYDGSNKYYADSVKGRFTISRDNSKNTLYLQMNSLRAEDTAVYYCAKEMLVQDYYYMDVWGQGTTVTVSS

SEQ ID NO: 818 - protein, 8 aa, synthetic construct
  REGION 1..8: note = source = /note="Description of Artificial Sequence: Synthetic peptide"
GFTFSSYG

SEQ ID NO: 819 - protein, 8 aa, synthetic construct
  REGION 1..8: note = source = /note="Description of Artificial Sequence: Synthetic peptide"
IRYDGSNK

SEQ ID NO: 820 - protein, 14 aa, synthetic construct
  REGION 1..14: note = source = /note="Description of Artificial Sequence: Synthetic peptide"
AKEMLVQDYYYMDV

SEQ ID NO: 821 - protein, 448 aa, synthetic construct
  REGION 1..448: note = source = /note="Description of Artificial Sequence: Synthetic polypeptide"
QVQLVESGGGLVQPGGSLRLSCAASGFTFSSYGMHWVRQAPGKGLEWVAFIRYDGSNKYYADSVKGRFTISRDNSKNTLYLQMNSLRAEDTAVYYCAKEMLVQDYYYMDVWGQGTTVTVSSASTKGPSVFPLAPCSRSTSESTAALGCLVKDYFPEPVTVSWNSGALTSGVHTFPAVLQSSGLYSLSSVVTVPSSSLGTKTYTCNVDHKPSNTKVDKRVESKYGPPCPPCPAPEFLGGPSVFLFPPKPKDTLMISRTPEVTCVVVDVSQEDPEVQFNWYVDGVEVHNAKTKPREEQFNSTYRVVSVLTVLHQDWLNGKEYKCKVSNKGLPSSIEKTISKAKGQPREPQVYTLPPSQEEMTKNQVSLTCLVKGFYPSDIAVEWESNGQPENNYKTTPPVLDSDGSFFLYSRLTVDKSRWQEGNVFSCSVMHEALHNHYTQKSLSLSPGK

SEQ ID NO: 822 - protein, 113 aa, synthetic construct
  REGION 1..113: note = source = /note="Description of Artificial Sequence: Synthetic polypeptide"
DVVMTQSPLSLPVSPGEPASISCRSSQNLLHRNGINYLNWYLQKPGQSPQLLIYWGSNRASGVPDRFSGSGSGTDFTLKISRVEAEDVGVYYCMQGLQIPPTFGQGTKVDIKR

SEQ ID NO: 823 - protein, 11 aa, synthetic construct
  REGION 1..11: note = source = /note="Description of Artificial Sequence: Synthetic peptide"
QNLLHRNGINY

SEQ ID NO: 824 - skipped

SEQ ID NO: 825 - protein, 9 aa, synthetic construct
  REGION 1..9: note = source = /note="Description of Artificial Sequence: Synthetic peptide"
MQGLQIPPT

SEQ ID NO: 826 - protein, 219 aa, synthetic construct
  REGION 1..219: note = source = /note="Description of Artificial Sequence: Synthetic polypeptide"
DVVMTQSPLSLPVSPGEPASISCRSSQNLLHRNGINYLNWYLQKPGQSPQLLIYWGSNRASGVPDRFSGSGSGTDFTLKISRVEAEDVGVYYCMQGLQIPPTFGQGTKVDIKRTVAAPSVFIFPPSDEQLKSGTASVVCLLNNFYPREAKVQWKVDNALQSGNSQESVTEQDSKDSTYSLSSTLTLSKADYEKHKVYACEVTHQGLSSPVTKSFNRGEC

SEQ ID NO: 827 - protein, 121 aa, synthetic construct
  REGION 1..121: note = source = /note="Description of Artificial Sequence: Synthetic polypeptide"
EVQLVETGGGLIQPGRSLRLSCAASGFTFSSYAMHWVRQAPGKGLEWVAVISYDGSNKYYADSVKGRFTISRDNSKNTLYLQMNSLRAEDTAVYYCARDPLPLHYYGMDVWGQGTTVTVSS

SEQ ID NO: 828 - protein, 8 aa, synthetic construct
  REGION 1..8: note = source = /note="Description of Artificial Sequence: Synthetic peptide"
GFTFSSYA

SEQ ID NO: 829 - protein, 8 aa, synthetic construct
  REGION 1..8: note = source = /note="Description of Artificial Sequence: Synthetic peptide"
ISYDGSNK

SEQ ID NO: 830 - protein, 14 aa, synthetic construct
  REGION 1..14: note = source = /note="Description of Artificial Sequence: Synthetic peptide"
ARDPLPLHYYGMDV

SEQ ID NO: 831 - protein, 448 aa, synthetic construct
  REGION 1..448: note = source = /note="Description of Artificial Sequence: Synthetic polypeptide"
EVQLVETGGGLIQPGRSLRLSCAASGFTFSSYAMHWVRQAPGKGLEWVAVISYDGSNKYYADSVKGRFTISRDNSKNTLYLQMNSLRAEDTAVYYCARDPLPLHYYGMDVWGQGTTVTVSSASTKGPSVFPLAPCSRSTSESTAALGCLVKDYFPEPVTVSWNSGALTSGVHTFPAVLQSSGLYSLSSVVTVPSSSLGTKTYTCNVDHKPSNTKVDKRVESKYGPPCPPCPAPEFLGGPSVFLFPPKPKDTLMISRTPEVTCVVVDVSQEDPEVQFNWYVDGVEVHNAKTKPREEQFNSTYRVVSVLTVLHQDWLNGKEYKCKVSNKGLPSSIEKTISKAKGQPREPQVYTLPPSQEEMTKNQVSLTCLVKGFYPSDIAVEWESNGQPENNYKTTPPVLDSDGSFFLYSRLTVDKSRWQEGNVFSCSVMHEALHNHYTQKSLSLSPGK

SEQ ID NO: 832 - protein, 111 aa, synthetic construct
  REGION 1..111: note = source = /note="Description of Artificial Sequence: Synthetic polypeptide"
QSALTQPRSASGNPGQRVTISCSGSSSNMGRRPVNWYQQIPGTAPKLLIYSQNQRPSGVPDRFSGSQSGTSASLTISGLQSEDEAEYFCAVWDDSLSSLQLGGGTQLAVLG

SEQ ID NO: 833 - protein, 8 aa, synthetic construct
  REGION 1..8: note = source = /note="Description of Artificial Sequence: Synthetic peptide"
SSNMGRRP

SEQ ID NO: 834 - skipped

SEQ ID NO: 835 - protein, 11 aa, synthetic construct
  REGION 1..11: note = source = /note="Description of Artificial Sequence: Synthetic peptide"
AVWDDSLSSLQ

SEQ ID NO: 836 - protein, 216 aa, synthetic construct
  REGION 1..216: note = source = /note="Description of Artificial Sequence: Synthetic polypeptide"
QSALTQPRSASGNPGQRVTISCSGSSSNMGRRPVNWYQQIPGTAPKLLIYSQNQRPSGVPDRFSGSQSGTSASLTISGLQSEDEAEYFCAVWDDSLSSLQLGGGTQLAVLGQPKAAPSVTLFPPSSEELQANKATLVCLISDFYPGAVTVAWKADSSPVKAGVETTTPSKQSNNKYAASSYLSLTPEQWKSHRSYSCQVTHEGSTVEKTVAPTECS

SEQ ID NO: 837 - protein, 121 aa, synthetic construct; identical to SEQ ID NO: 827
  REGION 1..121: note = source = /note="Description of Artificial Sequence: Synthetic polypeptide"

SEQ ID NO: 838 - protein, 8 aa, synthetic construct
  REGION 1..8: note = source = /note="Description of Artificial Sequence: Synthetic peptide"
GFTFSSYA

SEQ ID NO: 839 - protein, 8 aa, synthetic construct
  REGION 1..8: note = source = /note="Description of Artificial Sequence: Synthetic peptide"
ISYDGSNK

SEQ ID NO: 840 - protein, 14 aa, synthetic construct
  REGION 1..14: note = source = /note="Description of Artificial Sequence: Synthetic peptide"
ARDPLPLHYYGMDV

SEQ ID NO: 841 - protein, 448 aa, synthetic construct; identical to SEQ ID NO: 831
  REGION 1..448: note = source = /note="Description of Artificial Sequence: Synthetic polypeptide"

SEQ ID NO: 842 - protein, 111 aa, synthetic construct
  REGION 1..111: note = source = /note="Description of Artificial Sequence: Synthetic polypeptide"
QSALTQPRSASGNPGQRVTISCSGSSSNMGRRPVNWYQQIPGTAPKLLIYSQNQRPSGVPDRFSGSQSGTSASLTISGLQSEDEAEYFCAVWDDSLFSLLLGGGTQLAVLG

SEQ ID NO: 843 - protein, 8 aa, synthetic construct
  REGION 1..8: note = source = /note="Description of Artificial Sequence: Synthetic peptide"
SSNMGRRP

SEQ ID NO: 844 - skipped

SEQ ID NO: 845 - protein, 11 aa, synthetic construct
  REGION 1..11: note = source = /note="Description of Artificial Sequence: Synthetic peptide"
AVWDDSLFSLL

SEQ ID NO: 846 - protein, 216 aa, synthetic construct
  REGION 1..216: note = source = /note="Description of Artificial Sequence: Synthetic polypeptide"
QSALTQPRSASGNPGQRVTISCSGSSSNMGRRPVNWYQQIPGTAPKLLIYSQNQRPSGVPDRFSGSQSGTSASLTISGLQSEDEAEYFCAVWDDSLFSLLLGGGTQLAVLGQPKAAPSVTLFPPSSEELQANKATLVCLISDFYPGAVTVAWKADSSPVKAGVETTTPSKQSNNKYAASSYLSLTPEQWKSHRSYSCQVTHEGSTVEKTVAPTECS

SEQ ID NO: 847 - protein, 121 aa, synthetic construct
  REGION 1..121: note = source = /note="Description of Artificial Sequence: Synthetic polypeptide"
QVQLQESGPGLVKPSETLSLTCTVSGGSISSSSYYWGWIRQPPGKGLEWIGSIYYSGSTYYNPSLKSRVTISVDTSKNQFSLKLSSVTAADTAVYYCARQGAAAGNPFDIWGQGTMVTVSS

SEQ ID NO: 848 - protein, 10 aa, synthetic construct
  REGION 1..10: note = source = /note="Description of Artificial Sequence: Synthetic peptide"
GGSISSSSYY

SEQ ID NO: 849 - protein, 7 aa, synthetic construct
  REGION 1..7: note = source = /note="Description of Artificial Sequence: Synthetic peptide"
IYYSGST

SEQ ID NO: 850 - protein, 13 aa, synthetic construct
  REGION 1..13: note = source = /note="Description of Artificial Sequence: Synthetic peptide"
ARQGAAAGNPFDI

SEQ ID NO: 851 - protein, 448 aa, synthetic construct
  REGION 1..448: note = source = /note="Description of Artificial Sequence: Synthetic polypeptide"
QVQLQESGPGLVKPSETLSLTCTVSGGSISSSSYYWGWIRQPPGKGLEWIGSIYYSGSTYYNPSLKSRVTISVDTSKNQFSLKLSSVTAADTAVYYCARQGAAAGNPFDIWGQGTMVTVSSASTKGPSVFPLAPCSRSTSESTAALGCLVKDYFPEPVTVSWNSGALTSGVHTFPAVLQSSGLYSLSSVVTVPSSSLGTKTYTCNVDHKPSNTKVDKRVESKYGPPCPPCPAPEFLGGPSVFLFPPKPKDTLMISRTPEVTCVVVDVSQEDPEVQFNWYVDGVEVHNAKTKPREEQFNSTYRVVSVLTVLHQDWLNGKEYKCKVSNKGLPSSIEKTISKAKGQPREPQVYTLPPSQEEMTKNQVSLTCLVKGFYPSDIAVEWESNGQPENNYKTTPPVLDSDGSFFLYSRLTVDKSRWQEGNVFSCSVMHEALHNHYTQKSLSLSPGK

SEQ ID NO: 852 - protein, 111 aa, synthetic construct
  REGION 1..111: note = source = /note="Description of Artificial Sequence: Synthetic polypeptide"
QSVLTQPPSVSGTPGQRVTISCSGSSSNIGSNFVYWHQQLTGTAPKLLIYRNTQRPSGVPDRFSGSKSGTSASLAIGGLRSEDEADYYCATWDDSLSAWVFGGGTKLTVLG

SEQ ID NO: 853 - protein, 8 aa, synthetic construct
  REGION 1..8: note = source = /note="Description of Artificial Sequence: Synthetic peptide"
SSNIGSNF

SEQ ID NO: 854 - skipped

SEQ ID NO: 855 - protein, 11 aa, synthetic construct
  REGION 1..11: note = source = /note="Description of Artificial Sequence: Synthetic peptide"
ATWDDSLSAWV

SEQ ID NO: 856 - protein, 216 aa, synthetic construct
  REGION 1..216: note = source = /note="Description of Artificial Sequence: Synthetic polypeptide"
QSVLTQPPSVSGTPGQRVTISCSGSSSNIGSNFVYWHQQLTGTAPKLLIYRNTQRPSGVPDRFSGSKSGTSASLAIGGLRSEDEADYYCATWDDSLSAWVFGGGTKLTVLGQPKAAPSVTLFPPSSEELQANKATLVCLISDFYPGAVTVAWKADSSPVKAGVETTTPSKQSNNKYAASSYLSLTPEQWKSHRSYSCQVTHEGSTVEKTVAPTECS

SEQ ID NO: 857 - protein, 119 aa, synthetic construct
  REGION 1..119: note = source = /note="Description of Artificial Sequence: Synthetic polypeptide"
EVQLVETGGGLIQPGGSLRLSCAASGFTVSSNYMSWVRQAPGKGLEWVSVIYSGGSTYYADSVKGRFTISRDNSKNTLYLQMNSLRAEDTAVYYCARGARYSYGQYPYWGQGTLVTVSS

SEQ ID NO: 858 - protein, 8 aa, synthetic construct
  REGION 1..8: note = source = /note="Description of Artificial Sequence: Synthetic peptide"
GFTVSSNY

SEQ ID NO: 859 - protein, 7 aa, synthetic construct
  REGION 1..7: note = source = /note="Description of Artificial Sequence: Synthetic peptide"
IYSGGST

SEQ ID NO: 860 - protein, 13 aa, synthetic construct
  REGION 1..13: note = source = /note="Description of Artificial Sequence: Synthetic peptide"
ARGARYSYGQYPY

SEQ ID NO: 861 - protein, 446 aa, synthetic construct
  REGION 1..446: note = source = /note="Description of Artificial Sequence: Synthetic polypeptide"
EVQLVETGGGLIQPGGSLRLSCAASGFTVSSNYMSWVRQAPGKGLEWVSVIYSGGSTYYADSVKGRFTISRDNSKNTLYLQMNSLRAEDTAVYYCARGARYSYGQYPYWGQGTLVTVSSASTKGPSVFPLAPCSRSTSESTAALGCLVKDYFPEPVTVSWNSGALTSGVHTFPAVLQSSGLYSLSSVVTVPSSSLGTKTYTCNVDHKPSNTKVDKRVESKYGPPCPPCPAPEFLGGPSVFLFPPKPKDTLMISRTPEVTCVVVDVSQEDPEVQFNWYVDGVEVHNAKTKPREEQFNSTYRVVSVLTVLHQDWLNGKEYKCKVSNKGLPSSIEKTISKAKGQPREPQVYTLPPSQEEMTKNQVSLTCLVKGFYPSDIAVEWESNGQPENNYKTTPPVLDSDGSFFLYSRLTVDKSRWQEGNVFSCSVMHEALHNHYTQKSLSLSPGK

SEQ ID NO: 862 - protein, 109 aa, synthetic construct
  REGION 1..109: note = source = /note="Description of Artificial Sequence: Synthetic polypeptide"
DIQLTQSPSFLSASVGDRVTITCRASHDISSLFSWYQQKPGKAPKLLIYAASTLQTGVPSRFSGSASGTEFTLTISSLQPEDFATYYCLQLDSFPTWTFGQGTKVEIKR

SEQ ID NO: 863 - protein, 6 aa, synthetic construct
  REGION 1..6: note = source = /note="Description of Artificial Sequence: Synthetic peptide"
HDISSL

SEQ ID NO: 864 - skipped

SEQ ID NO: 865 - protein, 10 aa, synthetic construct
  REGION 1..10: note = source = /note="Description of Artificial Sequence: Synthetic peptide"
LQLDSFPTWT

SEQ ID NO: 866 - protein, 215 aa, synthetic construct
  REGION 1..215: note = source = /note="Description of Artificial Sequence: Synthetic polypeptide"
DIQLTQSPSFLSASVGDRVTITCRASHDISSLFSWYQQKPGKAPKLLIYAASTLQTGVPSRFSGSASGTEFTLTISSLQPEDFATYYCLQLDSFPTWTFGQGTKVEIKRTVAAPSVFIFPPSDEQLKSGTASVVCLLNNFYPREAKVQWKVDNALQSGNSQESVTEQDSKDSTYSLSSTLTLSKADYEKHKVYACEVTHQGLSSPVTKSFNRGEC

SEQ ID NO: 867 - protein, 121 aa, synthetic construct
  REGION 1..121: note = source = /note="Description of Artificial Sequence: Synthetic polypeptide"
EVQLVETGGGLIQPGRSLRLSCAASGFTFSSYAMHWVRQAPGKGLEWVAVISYDGTPVYYADSVKGRFTISRDNSKNTLYLQMNSLRAEDTAVYYCARDPLPLHYYGMDVWGQGTTVTVSS

SEQ ID NO: 868 - protein, 8 aa, synthetic construct
  REGION 1..8: note = source = /note="Description of Artificial Sequence: Synthetic peptide"
GFTFSSYA

SEQ ID NO: 869 - protein, 8 aa, synthetic construct
  REGION 1..8: note = source = /note="Description of Artificial Sequence: Synthetic peptide"
ISYDGTPV

SEQ ID NO: 870 - protein, 14 aa, synthetic construct
  REGION 1..14: note = source = /note="Description of Artificial Sequence: Synthetic peptide"
ARDPLPLHYYGMDV

SEQ ID NO: 871 - protein, 448 aa, synthetic construct
  REGION 1..448: note = source = /note="Description of Artificial Sequence: Synthetic polypeptide"
EVQLVETGGGLIQPGRSLRLSCAASGFTFSSYAMHWVRQAPGKGLEWVAVISYDGTPVYYADSVKGRFTISRDNSKNTLYLQMNSLRAEDTAVYYCARDPLPLHYYGMDVWGQGTTVTVSSASTKGPSVFPLAPCSRSTSESTAALGCLVKDYFPEPVTVSWNSGALTSGVHTFPAVLQSSGLYSLSSVVTVPSSSLGTKTYTCNVDHKPSNTKVDKRVESKYGPPCPPCPAPEFLGGPSVFLFPPKPKDTLMISRTPEVTCVVVDVSQEDPEVQFNWYVDGVEVHNAKTKPREEQFNSTYRVVSVLTVLHQDWLNGKEYKCKVSNKGLPSSIEKTISKAKGQPREPQVYTLPPSQEEMTKNQVSLTCLVKGFYPSDIAVEWESNGQPENNYKTTPPVLDSDGSFFLYSRLTVDKSRWQEGNVFSCSVMHEALHNHYTQKSLSLSPGK

SEQ ID NO: 872 - protein, 111 aa, synthetic construct
  REGION 1..111: note = source = /note="Description of Artificial Sequence: Synthetic polypeptide"
QSALTQPRSASGNPGQRVTISCSGSSSNMGRRPVNWYQQIPGTAPKLLIYSQNQRPSGVPDRFSGSQSGTSASLTISGLQSEDEAEYFCAVWDGDRRSLQLGGGTQLAVLG

SEQ ID NO: 873 - protein, 8 aa, synthetic construct
  REGION 1..8: note = source = /note="Description of Artificial Sequence: Synthetic peptide"
SSNMGRRP

SEQ ID NO: 874 - skipped

SEQ ID NO: 875 - protein, 11 aa, synthetic construct
  REGION 1..11: note = source = /note="Description of Artificial Sequence: Synthetic peptide"
AVWDGDRRSLQ

SEQ ID NO: 876 - protein, 216 aa, synthetic construct
  REGION 1..216: note = source = /note="Description of Artificial Sequence: Synthetic polypeptide"
QSALTQPRSASGNPGQRVTISCSGSSSNMGRRPVNWYQQIPGTAPKLLIYSQNQRPSGVPDRFSGSQSGTSASLTISGLQSEDEAEYFCAVWDGDRRSLQLGGGTQLAVLGQPKAAPSVTLFPPSSEELQANKATLVCLISDFYPGAVTVAWKADSSPVKAGVETTTPSKQSNNKYAASSYLSLTPEQWKSHRSYSCQVTHEGSTVEKTVAPTECS

SEQ ID NO: 877 - protein, 121 aa, synthetic construct
  REGION 1..121: note = source = /note="Description of Artificial Sequence: Synthetic polypeptide"
EVQLVETGGGLIQPGRSLRLSCAASGFTFSSYAMHWVRQAPGKGLEWVAVISYAGEVKYYADSVKGRFTISRDNSKNTLYLQMNSLRAEDTAVYYCARDPLPLHYYGMDVWGQGTTVTVSS

SEQ ID NO: 878 - protein, 8 aa, synthetic construct
  REGION 1..8: note = source = /note="Description of Artificial Sequence: Synthetic peptide"
GFTFSSYA

SEQ ID NO: 879 - protein, 8 aa, synthetic construct
  REGION 1..8: note = source = /note="Description of Artificial Sequence: Synthetic peptide"
ISYAGEVK

SEQ ID NO: 880 - protein, 14 aa, synthetic construct
  REGION 1..14: note = source = /note="Description of Artificial Sequence: Synthetic peptide"
ARDPLPLHYYGMDV

SEQ ID NO: 881 - protein, 448 aa, synthetic construct
  REGION 1..448: note = source = /note="Description of Artificial Sequence: Synthetic polypeptide"
EVQLVETGGGLIQPGRSLRLSCAASGFTFSSYAMHWVRQAPGKGLEWVAVISYAGEVKYYADSVKGRFTISRDNSKNTLYLQMNSLRAEDTAVYYCARDPLPLHYYGMDVWGQGTTVTVSSASTKGPSVFPLAPCSRSTSESTAALGCLVKDYFPEPVTVSWNSGALTSGVHTFPAVLQSSGLYSLSSVVTVPSSSLGTKTYTCNVDHKPSNTKVDKRVESKYGPPCPPCPAPEFLGGPSVFLFPPKPKDTLMISRTPEVTCVVVDVSQEDPEVQFNWYVDGVEVHNAKTKPREEQFNSTYRVVSVLTVLHQDWLNGKEYKCKVSNKGLPSSIEKTISKAKGQPREPQVYTLPPSQEEMTKNQVSLTCLVKGFYPSDIAVEWESNGQPENNYKTTPPVLDSDGSFFLYSRLTVDKSRWQEGNVFSCSVMHEALHNHYTQKSLSLSPGK

SEQ ID NO: 882 - protein, 111 aa, synthetic construct
  REGION 1..111: note = source = /note="Description of Artificial Sequence: Synthetic polypeptide"
QSALTQPRSASGNPGQRVTISCSGSSSNMGRRPVNWYQQIPGTAPKLLIYSQNQRPSGVPDRFSGSQSGTSASLTISGLQSEDEAEYFCAVWDDIGRVLQLGGGTQLAVLG

SEQ ID NO: 883 - protein, 8 aa, synthetic construct
  REGION 1..8: note = source = /note="Description of Artificial Sequence: Synthetic peptide"
SSNMGRRP

SEQ ID NO: 884 - skipped

SEQ ID NO: 885 - protein, 11 aa, synthetic construct
  REGION 1..11: note = source = /note="Description of Artificial Sequence: Synthetic peptide"
AVWDDIGRVLQ

SEQ ID NO: 886 - protein, 216 aa, synthetic construct
  REGION 1..216: note = source = /note="Description of Artificial Sequence: Synthetic polypeptide"
QSALTQPRSASGNPGQRVTISCSGSSSNMGRRPVNWYQQIPGTAPKLLIYSQNQRPSGVPDRFSGSQSGTSASLTISGLQSEDEAEYFCAVWDDIGRVLQLGGGTQLAVLGQPKAAPSVTLFPPSSEELQANKATLVCLISDFYPGAVTVAWKADSSPVKAGVETTTPSKQSNNKYAASSYLSLTPEQWKSHRSYSCQVTHEGSTVEKTVAPTECS

SEQ ID NO: 887 - protein, 121 aa, synthetic construct
  REGION 1..121: note = source = /note="Description of Artificial Sequence: Synthetic polypeptide"
EVQLVETGGGLIQPGRSLRLSCAASGFTFSSYAMHWVRQAPGKGLEWVAVISYDRTPVYYADSVKGRFTISRDNSKNTLYLQMNSLRAEDTAVYYCARDPLPLHYYGMDVWGQGTTVTVSS

SEQ ID NO: 888 - protein, 8 aa, synthetic construct
  REGION 1..8: note = source = /note="Description of Artificial Sequence: Synthetic peptide"
GFTFSSYA

SEQ ID NO: 889 - protein, 8 aa, synthetic construct
  REGION 1..8: note = source = /note="Description of Artificial Sequence: Synthetic peptide"
ISYDRTPV

SEQ ID NO: 890 - protein, 14 aa, synthetic construct
  REGION 1..14: note = source = /note="Description of Artificial Sequence: Synthetic peptide"
ARDPLPLHYYGMDV

SEQ ID NO: 891 - protein, 448 aa, synthetic construct
  REGION 1..448: note = source = /note="Description of Artificial Sequence: Synthetic polypeptide"
EVQLVETGGGLIQPGRSLRLSCAASGFTFSSYAMHWVRQAPGKGLEWVAVISYDRTPVYYADSVKGRFTISRDNSKNTLYLQMNSLRAEDTAVYYCARDPLPLHYYGMDVWGQGTTVTVSSASTKGPSVFPLAPCSRSTSESTAALGCLVKDYFPEPVTVSWNSGALTSGVHTFPAVLQSSGLYSLSSVVTVPSSSLGTKTYTCNVDHKPSNTKVDKRVESKYGPPCPPCPAPEFLGGPSVFLFPPKPKDTLMISRTPEVTCVVVDVSQEDPEVQFNWYVDGVEVHNAKTKPREEQFNSTYRVVSVLTVLHQDWLNGKEYKCKVSNKGLPSSIEKTISKAKGQPREPQVYTLPPSQEEMTKNQVSLTCLVKGFYPSDIAVEWESNGQPENNYKTTPPVLDSDGSFFLYSRLTVDKSRWQEGNVFSCSVMHEALHNHYTQKSLSLSPGK

SEQ ID NO: 892 - protein, 111 aa, synthetic construct
  REGION 1..111: note = source = /note="Description of Artificial Sequence: Synthetic polypeptide"
QSALTQPRSASGNPGQRVTISCSGSSSNMGRRPVNWYQQIPGTAPKLLIYSQNQRPSGVPDRFSGSQSGTSASLTISGLQSEDEAEYFCATWDDSLPRLNFGGGTKLAVLG

SEQ ID NO: 893 - protein, 8 aa, synthetic construct
  REGION 1..8: note = source = /note="Description of Artificial Sequence: Synthetic peptide"
SSNMGRRP

SEQ ID NO: 894 - skipped

SEQ ID NO: 895 - protein, 11 aa, synthetic construct
  REGION 1..11: note = source = /note="Description of Artificial Sequence: Synthetic peptide"
ATWDDSLPRLN

SEQ ID NO: 896 - protein, 216 aa, synthetic construct
  REGION 1..216: note = source = /note="Description of Artificial Sequence: Synthetic polypeptide"
QSALTQPRSASGNPGQRVTISCSGSSSNMGRRPVNWYQQIPGTAPKLLIYSQNQRPSGVPDRFSGSQSGTSASLTISGLQSEDEAEYFCATWDDSLPRLNFGGGTKLAVLGQPKAAPSVTLFPPSSEELQANKATLVCLISDFYPGAVTVAWKADSSPVKAGVETTTPSKQSNNKYAASSYLSLTPEQWKSHRSYSCQVTHEGSTVEKTVAPTECS

SEQ ID NO: 897 - protein, 121 aa, synthetic construct
  REGION 1..121: note = source = /note="Description of Artificial Sequence: Synthetic polypeptide"
EVQLVETGGGLIQPGRSLRLSCAASGFTFSSYAMHWVRQAPGKGLEWVAVISYEGDRKYYADSVKGRFTISRDNSKNTLYLQMNSLRAEDTAVYYCARDPLPLHYYGMDVWGQGTTVTVSS

SEQ ID NO: 898 - protein, 8 aa, synthetic construct
  REGION 1..8: note = source = /note="Description of Artificial Sequence: Synthetic peptide"
GFTFSSYA

SEQ ID NO: 899 - protein, 8 aa, synthetic construct
  REGION 1..8: note = source = /note="Description of Artificial Sequence: Synthetic peptide"
ISYEGDRK

SEQ ID NO: 900 - protein, 14 aa, synthetic construct
  REGION 1..14: note = source = /note="Description of Artificial Sequence: Synthetic peptide"
ARDPLPLHYYGMDV

SEQ ID NO: 901 - protein, 448 aa, synthetic construct
  REGION 1..448: note = source = /note="Description of Artificial Sequence: Synthetic polypeptide"
EVQLVETGGGLIQPGRSLRLSCAASGFTFSSYAMHWVRQAPGKGLEWVAVISYEGDRKYYADSVKGRFTISRDNSKNTLYLQMNSLRAEDTAVYYCARDPLPLHYYGMDVWGQGTTVTVSSASTKGPSVFPLAPCSRSTSESTAALGCLVKDYFPEPVTVSWNSGALTSGVHTFPAVLQSSGLYSLSSVVTVPSSSLGTKTYTCNVDHKPSNTKVDKRVESKYGPPCPPCPAPEFLGGPSVFLFPPKPKDTLMISRTPEVTCVVVDVSQEDPEVQFNWYVDGVEVHNAKTKPREEQFNSTYRVVSVLTVLHQDWLNGKEYKCKVSNKGLPSSIEKTISKAKGQPREPQVYTLPPSQEEMTKNQVSLTCLVKGFYPSDIAVEWESNGQPENNYKTTPPVLDSDGSFFLYSRLTVDKSRWQEGNVFSCSVMHEALHNHYTQKSLSLSPGK

SEQ ID NO: 902 - protein, 111 aa, synthetic construct
  REGION 1..111: note = source = /note="Description of Artificial Sequence: Synthetic polypeptide"
QSALTQPRSASGNPGQRVTISCSGSSSNMGRRPVNWYQQIPGTAPKLLIYSQNQRPSGVPDRFSGSQSGTSASLTISGLQSEDEAEYFCATWDDSTPHGVFGGGTKLAVLG

SEQ ID NO: 903 - protein, 8 aa, synthetic construct
  REGION 1..8: note = source = /note="Description of Artificial Sequence: Synthetic peptide"
SSNMGRRP

SEQ ID NO: 904 - skipped

SEQ ID NO: 905 - protein, 11 aa, synthetic construct
  REGION 1..11: note = source = /note="Description of Artificial Sequence: Synthetic peptide"
ATWDDSTPHGV

SEQ ID NO: 906 - protein, 216 aa, synthetic construct
  REGION 1..216: note = source = /note="Description of Artificial Sequence: Synthetic polypeptide"
QSALTQPRSASGNPGQRVTISCSGSSSNMGRRPVNWYQQIPGTAPKLLIYSQNQRPSGVPDRFSGSQSGTSASLTISGLQSEDEAEYFCATWDDSTPHGVFGGGTKLAVLGQPKAAPSVTLFPPSSEELQANKATLVCLISDFYPGAVTVAWKADSSPVKAGVETTTPSKQSNNKYAASSYLSLTPEQWKSHRSYSCQVTHEGSTVEKTVAPTECS

SEQ ID NO: 907 - protein, 118 aa, synthetic construct
  REGION 1..118: note = source = /note="Description of Artificial Sequence: Synthetic polypeptide"
EVQLVETGGGLIQPGGSLRLSCAASGFTVSSNYMSWVRQAPGKGLEWVSVIYSGGSTYYADSVKGRFTISRDNSKNTLYLQMNSLRAEDTAVYYCARGAPLFGQYPYWGQGTLVTVSS

SEQ ID NO: 908 - protein, 8 aa, synthetic construct
  REGION 1..8: note = source = /note="Description of Artificial Sequence: Synthetic peptide"
GFTVSSNY

SEQ ID NO: 909 - protein, 7 aa, synthetic construct
  REGION 1..7: note = source = /note="Description of Artificial Sequence: Synthetic peptide"
IYSGGST

SEQ ID NO: 910 - protein, 12 aa, synthetic construct
  REGION 1..12: note = source = /note="Description of Artificial Sequence: Synthetic peptide"
ARGAPLFGQYPY

SEQ ID NO: 911 - protein, 445 aa, synthetic construct
  REGION 1..445: note = source = /note="Description of Artificial Sequence: Synthetic polypeptide"
EVQLVETGGGLIQPGGSLRLSCAASGFTVSSNYMSWVRQAPGKGLEWVSVIYSGGSTYYADSVKGRFTISRDNSKNTLYLQMNSLRAEDTAVYYCARGAPLFGQYPYWGQGTLVTVSSASTKGPSVFPLAPCSRSTSESTAALGCLVKDYFPEPVTVSWNSGALTSGVHTFPAVLQSSGLYSLSSVVTVPSSSLGTKTYTCNVDHKPSNTKVDKRVESKYGPPCPPCPAPEFLGGPSVFLFPPKPKDTLMISRTPEVTCVVVDVSQEDPEVQFNWYVDGVEVHNAKTKPREEQFNSTYRVVSVLTVLHQDWLNGKEYKCKVSNKGLPSSIEKTISKAKGQPREPQVYTLPPSQEEMTKNQVSLTCLVKGFYPSDIAVEWESNGQPENNYKTTPPVLDSDGSFFLYSRLTVDKSRWQEGNVFSCSVMHEALHNHYTQKSLSLSPGK

SEQ ID NO: 912 - protein, 109 aa, synthetic construct
  REGION 1..109: note = source = /note="Description of Artificial Sequence: Synthetic polypeptide"
DIQMTQSPSSLSASVGDRVTITCRASHAIASLFSWYQQKPGKAPKLLIYAASTLQTGVPSRFSGSASGTEFTLTISSLQPEDFATYYCLQLDSFPTWTFGQGTKVEIKR

SEQ ID NO: 913 - protein, 6 aa, synthetic construct
  REGION 1..6: note = source = /note="Description of Artificial Sequence: Synthetic peptide"
HAIASL

SEQ ID NO: 914 - skipped

SEQ ID NO: 915 - protein, 10 aa, synthetic construct
  REGION 1..10: note = source = /note="Description of Artificial Sequence: Synthetic peptide"
LQLDSFPTWT

SEQ ID NO: 916 - protein, 215 aa, synthetic construct
  REGION 1..215: note = source = /note="Description of Artificial Sequence: Synthetic polypeptide"
DIQMTQSPSSLSASVGDRVTITCRASHAIASLFSWYQQKPGKAPKLLIYAASTLQTGVPSRFSGSASGTEFTLTISSLQPEDFATYYCLQLDSFPTWTFGQGTKVEIKRTVAAPSVFIFPPSDEQLKSGTASVVCLLNNFYPREAKVQWKVDNALQSGNSQESVTEQDSKDSTYSLSSTLTLSKADYEKHKVYACEVTHQGLSSPVTKSFNRGEC

SEQ ID NO: 917 - protein, 118 aa, synthetic construct
  REGION 1..118: note = source = /note="Description of Artificial Sequence: Synthetic polypeptide"
EVQLVETGGGLIQPGGSLRLSCAASGFTVSSNYMSWVRQAPGKGLEWVSVIYSGGSTYYADSVKGRFTISRDNSKNTLYLQMNSLRAEDTAVYYCARGARPNGQYPYWGQGTLVTVSS

SEQ ID NO: 918 - protein, 8 aa, synthetic construct
  REGION 1..8: note = source = /note="Description of Artificial Sequence: Synthetic peptide"
GFTVSSNY

SEQ ID NO: 919 - protein, 7 aa, synthetic construct
  REGION 1..7: note = source = /note="Description of Artificial Sequence: Synthetic peptide"
IYSGGST

SEQ ID NO: 920 - protein, 12 aa, synthetic construct
  REGION 1..12: note = source = /note="Description of Artificial Sequence: Synthetic peptide"
ARGARPNGQYPY

SEQ ID NO: 921 - protein, 445 aa, synthetic construct
  REGION 1..445: note = source = /note="Description of Artificial Sequence: Synthetic polypeptide"
EVQLVETGGGLIQPGGSLRLSCAASGFTVSSNYMSWVRQAPGKGLEWVSVIYSGGSTYYADSVKGRFTISRDNSKNTLYLQMNSLRAEDTAVYYCARGARPNGQYPYWGQGTLVTVSSASTKGPSVFPLAPCSRSTSESTAALGCLVKDYFPEPVTVSWNSGALTSGVHTFPAVLQSSGLYSLSSVVTVPSSSLGTKTYTCNVDHKPSNTKVDKRVESKYGPPCPPCPAPEFLGGPSVFLFPPKPKDTLMISRTPEVTCVVVDVSQEDPEVQFNWYVDGVEVHNAKTKPREEQFNSTYRVVSVLTVLHQDWLNGKEYKCKVSNKGLPSSIEKTISKAKGQPREPQVYTLPPSQEEMTKNQVSLTCLVKGFYPSDIAVEWESNGQPENNYKTTPPVLDSDGSFFLYSRLTVDKSRWQEGNVFSCSVMHEALHNHYTQKSLSLSPGK

SEQ ID NO: 922 - protein, 109 aa, synthetic construct
  REGION 1..109: note = source = /note="Description of Artificial Sequence: Synthetic polypeptide"
DIQLTQSPSFLSASVGDRVTITCRASHGIKSLFSWYQQKPGKAPKLLIYAASTLQTGVPSRFSGSASGTEFTLTISSLQPEDFATYYCLQLDSFPTWTFGQGTKVEIKR

SEQ ID NO: 923 - protein, 6 aa, synthetic construct
  REGION 1..6: note = source = /note="Description of Artificial Sequence: Synthetic peptide"
HGIKSL

SEQ ID NO: 924 - skipped

SEQ ID NO: 925 - protein, 10 aa, synthetic construct
  REGION 1..10: note = source = /note="Description of Artificial Sequence: Synthetic peptide"
LQLDSFPTWT

SEQ ID NO: 926 - protein, 215 aa, synthetic construct
  REGION 1..215: note = source = /note="Description of Artificial Sequence: Synthetic polypeptide"
DIQLTQSPSFLSASVGDRVTITCRASHGIKSLFSWYQQKPGKAPKLLIYAASTLQTGVPSRFSGSASGTEFTLTISSLQPEDFATYYCLQLDSFPTWTFGQGTKVEIKRTVAAPSVFIFPPSDEQLKSGTASVVCLLNNFYPREAKVQWKVDNALQSGNSQESVTEQDSKDSTYSLSSTLTLSKADYEKHKVYACEVTHQGLSSPVTKSFNRGEC

SEQ ID NO: 927 - protein, 119 aa, synthetic construct
  REGION 1..119: note = source = /note="Description of Artificial Sequence: Synthetic polypeptide"
EVQLQQSGPELVKPGSSVKMSCKASGYTFSSYVMHWVKQKPGQGLEWIGYIDPYNDGAKYNEKFKGKATLTSDKSSSTAYMELSSLTSEDSAVYYCARGGPYGWYFDVWGAGTTVTVSS

SEQ ID NO: 928 - protein, 8 aa, synthetic construct
  REGION 1..8: note = source = /note="Description of Artificial Sequence: Synthetic peptide"
GYTFSSYV

SEQ ID NO: 929 - protein, 8 aa, synthetic construct
  REGION 1..8: note = source = /note="Description of Artificial Sequence: Synthetic peptide"
IDPYNDGA

SEQ ID NO: 930 - protein, 12 aa, synthetic construct
  REGION 1..12: note = source = /note="Description of Artificial Sequence: Synthetic peptide"
ARGGPYGWYFDV

SEQ ID NO: 931 - protein, 446 aa, synthetic construct
  REGION 1..446: note = source = /note="Description of Artificial Sequence: Synthetic polypeptide"
EVQLQQSGPELVKPGSSVKMSCKASGYTFSSYVMHWVKQKPGQGLEWIGYIDPYNDGAKYNEKFKGKATLTSDKSSSTAYMELSSLTSEDSAVYYCARGGPYGWYFDVWGAGTTVTVSSASTKGPSVFPLAPCSRSTSESTAALGCLVKDYFPEPVTVSWNSGALTSGVHTFPAVLQSSGLYSLSSVVTVPSSSLGTKTYTCNVDHKPSNTKVDKRVESKYGPPCPPCPAPEFLGGPSVFLFPPKPKDTLMISRTPEVTCVVVDVSQEDPEVQFNWYVDGVEVHNAKTKPREEQFNSTYRVVSVLTVLHQDWLNGKEYKCKVSNKGLPSSIEKTISKAKGQPREPQVYTLPPSQEEMTKNQVSLTCLVKGFYPSDIAVEWESNGQPENNYKTTPPVLDSDGSFFLYSRLTVDKSRWQEGNVFSCSVMHEALHNHYTQKSLSLSPGK

SEQ ID NO: 932 - protein, 107 aa, synthetic construct
  REGION 1..107: note = source = /note="Description of Artificial Sequence: Synthetic polypeptide"
DIQMTQSPASLSASVGETVTITCRASEHIYSYLSWYQQKQGKSPQLLVYNAKTLAEGVPSRFSGSGSGTQFSLKINSLQPEDFGTYYCQHHFGSPLTFGAGTTLELK

SEQ ID NO: 933 - protein, 6 aa, synthetic construct
  REGION 1..6: note = source = /note="Description of Artificial Sequence: Synthetic peptide"
EHIYSY

SEQ ID NO: 934 - skipped

SEQ ID NO: 935 - protein, 9 aa, synthetic construct
  REGION 1..9: note = source = /note="Description of Artificial Sequence: Synthetic peptide"
QHHFGSPLT

SEQ ID NO: 936 - protein, 214 aa, synthetic construct
  REGION 1..214: note = source = /note="Description of Artificial Sequence: Synthetic polypeptide"
DIQMTQSPASLSASVGETVTITCRASEHIYSYLSWYQQKQGKSPQLLVYNAKTLAEGVPSRFSGSGSGTQFSLKINSLQPEDFGTYYCQHHFGSPLTFGAGTTLELKRTVAAPSVFIFPPSDEQLKSGTASVVCLLNNFYPREAKVQWKVDNALQSGNSQESVTEQDSKDSTYSLSSTLTLSKADYEKHKVYACEVTHQGLSSPVTKSFNRGEC

SEQ ID NO: 937 - protein, 130 aa, synthetic construct
  REGION 1..130: note = source = /note="Description of Artificial Sequence: Synthetic polypeptide"
QVHLQESGPGLVKPSETLSLTCTVSGGSVSSGIYYWSWIRQPPGKGLEWIGYIYYSGSTNYNPSLKSRVTISVDTSKNQFSLKLSSVTAADTAVYYCARDYYVSGNYYNVDYYFFGVDVWGQGTTVTVSS

SEQ ID NO: 938 - protein, 10 aa, synthetic construct
  REGION 1..10: note = source = /note="Description of Artificial Sequence: Synthetic peptide"
GGSVSSGIYY

SEQ ID NO: 939 - protein, 7 aa, synthetic construct
  REGION 1..7: note = source = /note="Description of Artificial Sequence: Synthetic peptide"
IYYSGST

SEQ ID NO: 940 - protein, 22 aa, synthetic construct
  REGION 1..22: note = source = /note="Description of Artificial Sequence: Synthetic peptide"
ARDYYVSGNYYNVDYYFFGVDV

SEQ ID NO: 941 - protein, 457 aa, synthetic construct
  REGION 1..457: note = source = /note="Description of Artificial Sequence: Synthetic polypeptide"
QVHLQESGPGLVKPSETLSLTCTVSGGSVSSGIYYWSWIRQPPGKGLEWIGYIYYSGSTNYNPSLKSRVTISVDTSKNQFSLKLSSVTAADTAVYYCARDYYVSGNYYNVDYYFFGVDVWGQGTTVTVSSASTKGPSVFPLAPCSRSTSESTAALGCLVKDYFPEPVTVSWNSGALTSGVHTFPAVLQSSGLYSLSSVVTVPSSSLGTKTYTCNVDHKPSNTKVDKRVESKYGPPCPPCPAPEFLGGPSVFLFPPKPKDTLMISRTPEVTCVVVDVSQEDPEVQFNWYVDGVEVHNAKTKPREEQFNSTYRVVSVLTVLHQDWLNGKEYKCKVSNKGLPSSIEKTISKAKGQPREPQVYTLPPSQEEMTKNQVSLTCLVKGFYPSDIAVEWESNGQPENNYKTTPPVLDSDGSFFLYSRLTVDKSRWQEGNVFSCSVMHEALHNHYTQKSLSLSPGK

SEQ ID NO: 942 - protein, 109 aa, synthetic construct
  REGION 1..109: note = source = /note="Description of Artificial Sequence: Synthetic polypeptide"
EIVLTQSPATLSLSPGERATLSCRASQSVSSYLAWYQQKPGQAPRLLIYDASNRATGIPARFSGSGSGTDFTLTISSLEPEDFAVYYCQQRSNWPPLFTFGPGTKVDIK

SEQ ID NO: 943 - protein, 6 aa, synthetic construct
  REGION 1..6: note = source = /note="Description of Artificial Sequence: Synthetic peptide"
QSVSSY

SEQ ID NO: 944 - skipped

SEQ ID NO: 945 - protein, 11 aa, synthetic construct
  REGION 1..11: note = source = /note="Description of Artificial Sequence: Synthetic peptide"
QQRSNWPPLFT

SEQ ID NO: 946 - protein, 216 aa, synthetic construct
  REGION 1..216: note = source = /note="Description of Artificial Sequence: Synthetic polypeptide"
EIVLTQSPATLSLSPGERATLSCRASQSVSSYLAWYQQKPGQAPRLLIYDASNRATGIPARFSGSGSGTDFTLTISSLEPEDFAVYYCQQRSNWPPLFTFGPGTKVDIKRTVAAPSVFIFPPSDEQLKSGTASVVCLLNNFYPREAKVQWKVDNALQSGNSQESVTEQDSKDSTYSLSSTLTLSKADYEKHKVYACEVTHQGLSSPVTKSFNRGEC

SEQ ID NO: 947 - protein, 119 aa, synthetic construct
  REGION 1..119: note = source = /note="Description of Artificial Sequence: Synthetic polypeptide"
QVQLVQSGAEVKKPGASVKVSCKASGYTFTEYTLHWVRQAPGQGLEWMGGINPNNGGTSYAQKFQGRVTMTRDTSTSTVYMELSSLRSEDTAVYYCARSGYYDYSFAYWGQGTLVTVSS

SEQ ID NO: 948 - protein, 10 aa, synthetic construct
  REGION 1..10: note = source = /note="Description of Artificial Sequence: Synthetic peptide"
GYTFTEYTLH

SEQ ID NO: 949 - protein, 10 aa, synthetic construct
  REGION 1..10: note = source = /note="Description of Artificial Sequence: Synthetic peptide"
GINPNNGGTS

SEQ ID NO: 950 - protein, 10 aa, synthetic construct
  REGION 1..10: note = source = /note="Description of Artificial Sequence: Synthetic peptide"
SGYYDYSFAY

SEQ ID NO: 951 - protein, 446 aa, synthetic construct
  REGION 1..446: note = source = /note="Description of Artificial Sequence: Synthetic polypeptide"
QVQLVQSGAEVKKPGASVKVSCKASGYTFTEYTLHWVRQAPGQGLEWMGGINPNNGGTSYAQKFQGRVTMTRDTSTSTVYMELSSLRSEDTAVYYCARSGYYDYSFAYWGQGTLVTVSSASTKGPSVFPLAPCSRSTSESTAALGCLVKDYFPEPVTVSWNSGALTSGVHTFPAVLQSSGLYSLSSVVTVPSSSLGTKTYTCNVDHKPSNTKVDKRVESKYGPPCPPCPAPEFLGGPSVFLFPPKPKDTLMISRTPEVTCVVVDVSQEDPEVQFNWYVDGVEVHNAKTKPREEQFNSTYRVVSVLTVLHQDWLNGKEYKCKVSNKGLPSSIEKTISKAKGQPREPQVYTLPPSQEEMTKNQVSLTCLVKGFYPSDIAVEWESNGQPENNYKTTPPVLDSDGSFFLYSRLTVDKSRWQEGNVFSCSVMHEALHNHYTQKSLSLSPGK

SEQ ID NO: 952 - protein, 107 aa, synthetic construct
  REGION 1..107: note = source = /note="Description of Artificial Sequence: Synthetic polypeptide"
DIQMTQSPSSLSASVGDRVTITCRASQDVKNAVVWYQQKPGKAPKLLIYSPSYRYTGVPSRFSGSGSGTDFTLTISSLQPEDFATYYCQQHYSTPFTFGQGTKLEIK

SEQ ID NO: 953 - protein, 11 aa, synthetic construct
  REGION 1..11: note = source = /note="Description of Artificial Sequence: Synthetic peptide"
RASQDVKNAVV

SEQ ID NO: 954 - protein, 7 aa, synthetic construct
  REGION 1..7: note = source = /note="Description of Artificial Sequence: Synthetic peptide"
SPSYRYT

SEQ ID NO: 955 - protein, 9 aa, synthetic construct
  REGION 1..9: note = source = /note="Description of Artificial Sequence: Synthetic peptide"
QQHYSTPFT

SEQ ID NO: 956 - protein, 214 aa, synthetic construct
  REGION 1..214: note = source = /note="Description of Artificial Sequence: Synthetic polypeptide"
DIQMTQSPSSLSASVGDRVTITCRASQDVKNAVVWYQQKPGKAPKLLIYSPSYRYTGVPSRFSGSGSGTDFTLTISSLQPEDFATYYCQQHYSTPFTFGQGTKLEIKRTVAAPSVFIFPPSDEQLKSGTASVVCLLNNFYPREAKVQWKVDNALQSGNSQESVTEQDSKDSTYSLSSTLTLSKADYEKHKVYACEVTHQGLSSPVTKSFNRGEC

SEQ ID NO: 957 - protein, 161 aa, synthetic construct
  REGION 1..161: note = source = /note="Description of Artificial Sequence: Synthetic polypeptide"
QVQLVQSGAEVKKPGASVKVSCKTSGYTFTEYTLHWVRQAPGQGLEWIGGINPNNGGTSYAQKFQGRVTMTVDTSTSTVYMELSSLRSEDTAVYYCAGSGYYDYSFAYWGQGTLVTVSSTVYMELSSLRSEDTAVYYCAGSGYYDYSFAYWGQGTLVTVSS

SEQ ID NO: 958 - protein, 10 aa, synthetic construct
  REGION 1..10: note = source = /note="Description of Artificial Sequence: Synthetic peptide"
GYTFTEYTLH

SEQ ID NO: 959 - protein, 10 aa, synthetic construct
  REGION 1..10: note = source = /note="Description of Artificial Sequence: Synthetic peptide"
GINPNNGGTS

SEQ ID NO: 960 - protein, 10 aa, synthetic construct
  REGION 1..10: note = source = /note="Description of Artificial Sequence: Synthetic peptide"
SGYYDYSFAY

SEQ ID NO: 961 - protein, 446 aa, synthetic construct
  REGION 1..446: note = source = /note="Description of Artificial Sequence: Synthetic polypeptide"
QVQLVQSGAEVKKPGASVKVSCKTSGYTFTEYTLHWVRQAPGQGLEWIGGINPNNGGTSYAQKFQGRVTMTVDTSTSTVYMELSSLRSEDTAVYYCAGSGYYDYSFAYWGQGTLVTVSSASTKGPSVFPLAPCSRSTSESTAALGCLVKDYFPEPVTVSWNSGALTSGVHTFPAVLQSSGLYSLSSVVTVPSSSLGTKTYTCNVDHKPSNTKVDKRVESKYGPPCPPCPAPEFLGGPSVFLFPPKPKDTLMISRTPEVTCVVVDVSQEDPEVQFNWYVDGVEVHNAKTKPREEQFNSTYRVVSVLTVLHQDWLNGKEYKCKVSNKGLPSSIEKTISKAKGQPREPQVYTLPPSQEEMTKNQVSLTCLVKGFYPSDIAVEWESNGQPENNYKTTPPVLDSDGSFFLYSRLTVDKSRWQEGNVFSCSVMHEALHNHYTQKSLSLSPGK

SEQ ID NO: 962 - protein, 107 aa, synthetic construct; identical to SEQ ID NO: 952
  REGION 1..107: note = source = /note="Description of Artificial Sequence: Synthetic polypeptide"

SEQ ID NO: 963 - protein, 11 aa, synthetic construct
  REGION 1..11: note = source = /note="Description of Artificial Sequence: Synthetic peptide"
RASQDVKNAVV

SEQ ID NO: 964 - protein, 7 aa, synthetic construct
  REGION 1..7: note = source = /note="Description of Artificial Sequence: Synthetic peptide"
SPSYRYT

SEQ ID NO: 965 - protein, 9 aa, synthetic construct
  REGION 1..9: note = source = /note="Description of Artificial Sequence: Synthetic peptide"
QQHYSTPFT

SEQ ID NO: 966 - protein, 214 aa, synthetic construct; identical to SEQ ID NO: 956
  REGION 1..214: note = source = /note="Description of Artificial Sequence: Synthetic polypeptide"

SEQ ID NO: 967 - protein, 119 aa, synthetic construct
  REGION 1..119: note = source = /note="Description of Artificial Sequence: Synthetic polypeptide"
QVQLVQSGAEVKKPGASVKVSCKTSGYTFTEYTLHWVRQAPGQGLEWIGGINPNNGGTSYAQKFQGRVTMTVDTSTSTVYMELSSLRSEDTAVYYCAGSGYYDYSFAYWGQGTLVTVSS

SEQ ID NO: 968 - protein, 10 aa, synthetic construct
  REGION 1..10: note = source = /note="Description of Artificial Sequence: Synthetic peptide"
GYTFTEYTLH

SEQ ID NO: 969 - protein, 10 aa, synthetic construct
  REGION 1..10: note = source = /note="Description of Artificial Sequence: Synthetic peptide"
GINPNNGGTS

SEQ ID NO: 970 - protein, 10 aa, synthetic construct
  REGION 1..10: note = source = /note="Description of Artificial Sequence: Synthetic peptide"
SGYYDYSFAY

SEQ ID NO: 971 - protein, 446 aa, synthetic construct; identical to SEQ ID NO: 961
  REGION 1..446: note = source = /note="Description of Artificial Sequence: Synthetic polypeptide"

SEQ ID NO: 972 - protein, 107 aa, synthetic construct
  REGION 1..107: note = source = /note="Description of Artificial Sequence: Synthetic polypeptide"
DIQMTQSPSSLSASVGDRVTITCRASQDVKNAVVWYQQKPGKAPKLLIYSPSYRYTGVPSRFSGSGSGTDFTFTISSVQPEDFATYYCQQHYSTPFTFGQGTKLEIK

SEQ ID NO: 973 - protein, 11 aa, synthetic construct
  REGION 1..11: note = source = /note="Description of Artificial Sequence: Synthetic peptide"
RASQDVKNAVV

SEQ ID NO: 974 - protein, 7 aa, synthetic construct
  REGION 1..7: note = source = /note="Description of Artificial Sequence: Synthetic peptide"
SPSYRYT

SEQ ID NO: 975 - protein, 9 aa, synthetic construct
  REGION 1..9: note = source = /note="Description of Artificial Sequence: Synthetic peptide"
QQHYSTPFT

SEQ ID NO: 976 - protein, 214 aa, synthetic construct
  REGION 1..214: note = source = /note="Description of Artificial Sequence: Synthetic polypeptide"
DIQMTQSPSSLSASVGDRVTITCRASQDVKNAVVWYQQKPGKAPKLLIYSPSYRYTGVPSRFSGSGSGTDFTFTISSVQPEDFATYYCQQHYSTPFTFGQGTKLEIKRTVAAPSVFIFPPSDEQLKSGTASVVCLLNNFYPREAKVQWKVDNALQSGNSQESVTEQDSKDSTYSLSSTLTLSKADYEKHKVYACEVTHQGLSSPVTKSFNRGEC

SEQ ID NO: 977 - protein, 119 aa, synthetic construct
  REGION 1..119: note = source = /note="Description of Artificial Sequence: Synthetic polypeptide"
QVQLVQSGAEVKKPGASVKISCKTSGYTFTEYTLHWVRQAPGQGLEWIGGINPNNGGTSYAQKFQGRATLTVDTSTSTAYMELSSLRSEDTAVYYCAGSGYYDYSFAYWGQGTLVTVSS

SEQ ID NO: 978 - protein, 10 aa, synthetic construct
  REGION 1..10: note = source = /note="Description of Artificial Sequence: Synthetic peptide"
GYTFTEYTLH

SEQ ID NO: 979 - protein, 10 aa, synthetic construct
  REGION 1..10: note = source = /note="Description of Artificial Sequence: Synthetic peptide"
GINPNNGGTS

SEQ ID NO: 980 - protein, 10 aa, synthetic construct
  REGION 1..10: note = source = /note="Description of Artificial Sequence: Synthetic peptide"
SGYYDYSFAY

SEQ ID NO: 981 - protein, 446 aa, synthetic construct
  REGION 1..446: note = source = /note="Description of Artificial Sequence: Synthetic polypeptide"
QVQLVQSGAEVKKPGASVKISCKTSGYTFTEYTLHWVRQAPGQGLEWIGGINPNNGGTSYAQKFQGRATLTVDTSTSTAYMELSSLRSEDTAVYYCAGSGYYDYSFAYWGQGTLVTVSSASTKGPSVFPLAPCSRSTSESTAALGCLVKDYFPEPVTVSWNSGALTSGVHTFPAVLQSSGLYSLSSVVTVPSSSLGTKTYTCNVDHKPSNTKVDKRVESKYGPPCPPCPAPEFLGGPSVFLFPPKPKDTLMISRTPEVTCVVVDVSQEDPEVQFNWYVDGVEVHNAKTKPREEQFNSTYRVVSVLTVLHQDWLNGKEYKCKVSNKGLPSSIEKTISKAKGQPREPQVYTLPPSQEEMTKNQVSLTCLVKGFYPSDIAVEWESNGQPENNYKTTPPVLDSDGSFFLYSRLTVDKSRWQEGNVFSCSVMHEALHNHYTQKSLSLSPGK

SEQ ID NO: 982 - protein, 107 aa, synthetic construct; identical to SEQ ID NO: 952
  REGION 1..107: note = source = /note="Description of Artificial Sequence: Synthetic polypeptide"

SEQ ID NO: 983 - protein, 11 aa, synthetic construct
  REGION 1..11: note = source = /note="Description of Artificial Sequence: Synthetic peptide"
RASQDVKNAVV

SEQ ID NO: 984 - protein, 7 aa, synthetic construct
  REGION 1..7: note = source = /note="Description of Artificial Sequence: Synthetic peptide"
SPSYRYT

SEQ ID NO: 985 - protein, 9 aa, synthetic construct
  REGION 1..9: note = source = /note="Description of Artificial Sequence: Synthetic peptide"
QQHYSTPFT

SEQ ID NO: 986 - protein, 214 aa, synthetic construct; identical to SEQ ID NO: 956
  REGION 1..214: note = source = /note="Description of Artificial Sequence: Synthetic polypeptide"

SEQ ID NO: 987 - protein, 119 aa, synthetic construct; identical to SEQ ID NO: 977
  REGION 1..119: note = source = /note="Description of Artificial Sequence: Synthetic polypeptide"

SEQ ID NO: 988 - protein, 10 aa, synthetic construct
  REGION 1..10: note = source = /note="Description of Artificial Sequence: Synthetic peptide"
GYTFTEYTLH

SEQ ID NO: 989 - protein, 10 aa, synthetic construct
  REGION 1..10: note = source = /note="Description of Artificial Sequence: Synthetic peptide"
GINPNNGGTS

SEQ ID NO: 990 - protein, 10 aa, synthetic construct
  REGION 1..10: note = source = /note="Description of Artificial Sequence: Synthetic peptide"
SGYYDYSFAY

SEQ ID NO: 991 - protein, 446 aa, synthetic construct; identical to SEQ ID NO: 981
  REGION 1..446: note = source = /note="Description of Artificial Sequence: Synthetic polypeptide"

SEQ ID NO: 992 - protein, 107 aa, synthetic construct; identical to SEQ ID NO: 972
  REGION 1..107: note = source = /note="Description of Artificial Sequence: Synthetic polypeptide"

SEQ ID NO: 993 - protein, 11 aa, synthetic construct
  REGION 1..11: note = source = /note="Description of Artificial Sequence: Synthetic peptide"
RASQDVKNAVV

SEQ ID NO: 994 - protein, 7 aa, synthetic construct
  REGION 1..7: note = source = /note="Description of Artificial Sequence: Synthetic peptide"
SPSYRYT

SEQ ID NO: 995 - protein, 9 aa, synthetic construct
  REGION 1..9: note = source = /note="Description of Artificial Sequence: Synthetic peptide"
QQHYSTPFT

SEQ ID NO: 996 - protein, 214 aa, synthetic construct; identical to SEQ ID NO: 976
  REGION 1..214: note = source = /note="Description of Artificial Sequence: Synthetic polypeptide"

SEQ ID NO: 997 - protein, 119 aa, synthetic construct
  REGION 1..119: note = source = /note="Description of Artificial Sequence: Synthetic polypeptide"
QVQLVQSGAEVKKPGASVKISCKTSGYTFTEYTLHWVRQAPGQGLEWIGGINPNNGGTSYAQKFQGRATLTVDKSTSTAYMELSSLRSEDTAVYYCAGSGYYDYSFAYWGQGTLVTVSS

SEQ ID NO: 998 - protein, 10 aa, synthetic construct
  REGION 1..10: note = source = /note="Description of Artificial Sequence: Synthetic peptide"
GYTFTEYTLH

SEQ ID NO: 999 - protein, 10 aa, synthetic construct
  REGION 1..10: note = source = /note="Description of Artificial Sequence: Synthetic peptide"
GINPNNGGTS

SEQ ID NO: 1000 - protein, 10 aa, synthetic construct
  REGION 1..10: note = source = /note="Description of Artificial Sequence: Synthetic peptide"
SGYYDYSFAY

SEQ ID NO: 1001 - protein, 446 aa, synthetic construct
  REGION 1..446: note = source = /note="Description of Artificial Sequence: Synthetic polypeptide"
QVQLVQSGAEVKKPGASVKISCKTSGYTFTEYTLHWVRQAPGQGLEWIGGINPNNGGTSYAQKFQGRATLTVDKSTSTAYMELSSLRSEDTAVYYCAGSGYYDYSFAYWGQGTLVTVSSASTKGPSVFPLAPCSRSTSESTAALGCLVKDYFPEPVTVSWNSGALTSGVHTFPAVLQSSGLYSLSSVVTVPSSSLGTKTYTCNVDHKPSNTKVDKRVESKYGPPCPPCPAPEFLGGPSVFLFPPKPKDTLMISRTPEVTCVVVDVSQEDPEVQFNWYVDGVEVHNAKTKPREEQFNSTYRVVSVLTVLHQDWLNGKEYKCKVSNKGLPSSIEKTISKAKGQPREPQVYTLPPSQEEMTKNQVSLTCLVKGFYPSDIAVEWESNGQPENNYKTTPPVLDSDGSFFLYSRLTVDKSRWQEGNVFSCSVMHEALHNHYTQKSLSLSPGK

SEQ ID NO: 1002 - protein, 107 aa, synthetic construct; identical to SEQ ID NO: 952
  REGION 1..107: note = source = /note="Description of Artificial Sequence: Synthetic polypeptide"

SEQ ID NO: 1003 - protein, 11 aa, synthetic construct
  REGION 1..11: note = source = /note="Description of Artificial Sequence: Synthetic peptide"
RASQDVKNAVV

SEQ ID NO: 1004 - protein, 7 aa, synthetic construct
  REGION 1..7: note = source = /note="Description of Artificial Sequence: Synthetic peptide"
SPSYRYT

SEQ ID NO: 1005 - protein, 9 aa, synthetic construct
  REGION 1..9: note = source = /note="Description of Artificial Sequence: Synthetic peptide"
QQHYSTPFT

SEQ ID NO: 1006 - protein, 214 aa, synthetic construct; identical to SEQ ID NO: 956
  REGION 1..214: note = source = /note="Description of Artificial Sequence: Synthetic polypeptide"

SEQ ID NO: 1007 - protein, 119 aa, synthetic construct; identical to SEQ ID NO: 997
  REGION 1..119: note = source = /note="Description of Artificial Sequence: Synthetic polypeptide"

SEQ ID NO: 1008 - protein, 10 aa, synthetic construct
  REGION 1..10: note = source = /note="Description of Artificial Sequence: Synthetic peptide"
GYTFTEYTLH

SEQ ID NO: 1009 - protein, 10 aa, synthetic construct
  REGION 1..10: note = source = /note="Description of Artificial Sequence: Synthetic peptide"
GINPNNGGTS

SEQ ID NO: 1010 - protein, 10 aa, synthetic construct
  REGION 1..10: note = source = /note="Description of Artificial Sequence: Synthetic peptide"
SGYYDYSFAY

SEQ ID NO: 1011 - protein, 446 aa, synthetic construct; identical to SEQ ID NO: 1001
  REGION 1..446: note = source = /note="Description of Artificial Sequence: Synthetic polypeptide"

SEQ ID NO: 1012 - protein, 107 aa, synthetic construct; identical to SEQ ID NO: 972
  REGION 1..107: note = source = /note="Description of Artificial Sequence: Synthetic polypeptide"

SEQ ID NO: 1013 - protein, 11 aa, synthetic construct
  REGION 1..11: note = source = /note="Description of Artificial Sequence: Synthetic peptide"
RASQDVKNAVV

SEQ ID NO: 1014 - protein, 7 aa, synthetic construct
  REGION 1..7: note = source = /note="Description of Artificial Sequence: Synthetic peptide"
SPSYRYT

SEQ ID NO: 1015 - protein, 9 aa, synthetic construct
  REGION 1..9: note = source = /note="Description of Artificial Sequence: Synthetic peptide"
QQHYSTPFT

SEQ ID NO: 1016 - protein, 214 aa, synthetic construct; identical to SEQ ID NO: 976
  REGION 1..214: note = source = /note="Description of Artificial Sequence: Synthetic polypeptide"

SEQ ID NO: 1017 - protein, 119 aa, synthetic construct
  REGION 1..119: note = source = /note="Description of Artificial Sequence: Synthetic polypeptide"
QVQLVQSGAEVKKPGASVKVSCKASGYTFTNYGMNWVRQAPGQGLEWMGWINTYTGEPTYAQKFQGRVTMTRDTSTSTVYMELSSLRSEDTAVYYCARGNGYYVGMDYWGQGTLVTVSS

SEQ ID NO: 1018 - protein, 10 aa, synthetic construct
  REGION 1..10: note = source = /note="Description of Artificial Sequence: Synthetic peptide"
GYTFTNYGMN

SEQ ID NO: 1019 - protein, 10 aa, synthetic construct
  REGION 1..10: note = source = /note="Description of Artificial Sequence: Synthetic peptide"
WINTYTGEPT

SEQ ID NO: 1020 - protein, 10 aa, synthetic construct
  REGION 1..10: note = source = /note="Description of Artificial Sequence: Synthetic peptide"
GNGYYVGMDY

SEQ ID NO: 1021 - protein, 446 aa, synthetic construct
  REGION 1..446: note = source = /note="Description of Artificial Sequence: Synthetic polypeptide"
QVQLVQSGAEVKKPGASVKVSCKASGYTFTNYGMNWVRQAPGQGLEWMGWINTYTGEPTYAQKFQGRVTMTRDTSTSTVYMELSSLRSEDTAVYYCARGNGYYVGMDYWGQGTLVTVSSASTKGPSVFPLAPCSRSTSESTAALGCLVKDYFPEPVTVSWNSGALTSGVHTFPAVLQSSGLYSLSSVVTVPSSSLGTKTYTCNVDHKPSNTKVDKRVESKYGPPCPPCPAPEFLGGPSVFLFPPKPKDTLMISRTPEVTCVVVDVSQEDPEVQFNWYVDGVEVHNAKTKPREEQFNSTYRVVSVLTVLHQDWLNGKEYKCKVSNKGLPSSIEKTISKAKGQPREPQVYTLPPSQEEMTKNQVSLTCLVKGFYPSDIAVEWESNGQPENNYKTTPPVLDSDGSFFLYSRLTVDKSRWQEGNVFSCSVMHEALHNHYTQKSLSLSPGK

SEQ ID NO: 1022 - protein, 109 aa, synthetic construct
  REGION 1..109: note = source = /note="Description of Artificial Sequence: Synthetic polypeptide"
QAVVTQEPSLTVSPGGTVTLTCRSSTGAVTTSNHANWFQQKPGQAPRTLIYGTNGRGSWTPARFSGSLLGGKAALTLSGAQPEDEAEYYCALWFSNHWVFGGGTKLTVL

SEQ ID NO: 1023 - protein, 14 aa, synthetic construct
  REGION 1..14: note = source = /note="Description of Artificial Sequence: Synthetic peptide"
RSSTGAVTTSNHAN

SEQ ID NO: 1024 - protein, 7 aa, synthetic construct
  REGION 1..7: note = source = /note="Description of Artificial Sequence: Synthetic peptide"
GTNGRGS

SEQ ID NO: 1025 - protein, 9 aa, synthetic construct
  REGION 1..9: note = source = /note="Description of Artificial Sequence: Synthetic peptide"
ALWFSNHWV

SEQ ID NO: 1026 - protein, 214 aa, synthetic construct
  REGION 1..214: note = source = /note="Description of Artificial Sequence: Synthetic polypeptide"
QAVVTQEPSLTVSPGGTVTLTCRSSTGAVTTSNHANWFQQKPGQAPRTLIYGTNGRGSWTPARFSGSLLGGKAALTLSGAQPEDEAEYYCALWFSNHWVFGGGTKLTVLQPKAAPSVTLFPPSSEELQANKATLVCLISDFYPGAVTVAWKADSSPVKAGVETTTPSKQSNNKYAASSYLSLTPEQWKSHRSYSCQVTHEGSTVEKTVAPTECS

SEQ ID NO: 1027 - protein, 119 aa, synthetic construct
  REGION 1..119: note = source = /note="Description of Artificial Sequence: Synthetic polypeptide"
QVQLVQSGAEVKKPGASVKVSCKASGYTFTNYGMNWVRQAPGQGLEWMGWINTYTGEPTYAQKFQGRVTMTLDTSTSTAYMELSSLRSEDTAVYYCSRGNGYYVGMDYWGQGTLVTVSS

SEQ ID NO: 1028 - protein, 10 aa, synthetic construct
  REGION 1..10: note = source = /note="Description of Artificial Sequence: Synthetic peptide"
GYTFTNYGMN

SEQ ID NO: 1029 - protein, 10 aa, synthetic construct
  REGION 1..10: note = source = /note="Description of Artificial Sequence: Synthetic peptide"
WINTYTGEPT

SEQ ID NO: 1030 - protein, 10 aa, synthetic construct
  REGION 1..10: note = source = /note="Description of Artificial Sequence: Synthetic peptide"
GNGYYVGMDY

SEQ ID NO: 1031 - protein, 446 aa, synthetic construct
  REGION 1..446: note = source = /note="Description of Artificial Sequence: Synthetic polypeptide"
QVQLVQSGAEVKKPGASVKVSCKASGYTFTNYGMNWVRQAPGQGLEWMGWINTYTGEPTYAQKFQGRVTMTLDTSTSTAYMELSSLRSEDTAVYYCSRGNGYYVGMDYWGQGTLVTVSSASTKGPSVFPLAPCSRSTSESTAALGCLVKDYFPEPVTVSWNSGALTSGVHTFPAVLQSSGLYSLSSVVTVPSSSLGTKTYTCNVDHKPSNTKVDKRVESKYGPPCPPCPAPEFLGGPSVFLFPPKPKDTLMISRTPEVTCVVVDVSQEDPEVQFNWYVDGVEVHNAKTKPREEQFNSTYRVVSVLTVLHQDWLNGKEYKCKVSNKGLPSSIEKTISKAKGQPREPQVYTLPPSQEEMTKNQVSLTCLVKGFYPSDIAVEWESNGQPENNYKTTPPVLDSDGSFFLYSRLTVDKSRWQEGNVFSCSVMHEALHNHYTQKSLSLSPGK

SEQ ID NO: 1032 - protein, 109 aa, synthetic construct
  REGION 1..109: note = source = /note="Description of Artificial Sequence: Synthetic polypeptide"
QAVVTQEPSLTVSPGGTVTLTCGSSTGAVTTSNHANWVQQKPGQAFRGLIRGTNGRGSWTPARFSGSLLGGKAALTISGAQPEDEAEYYCALWFSNHWVFGGGTKLTVL

SEQ ID NO: 1033 - protein, 14 aa, synthetic construct
  REGION 1..14: note = source = /note="Description of Artificial Sequence: Synthetic peptide"
GSSTGAVTTSNHAN

SEQ ID NO: 1034 - protein, 7 aa, synthetic construct
  REGION 1..7: note = source = /note="Description of Artificial Sequence: Synthetic peptide"
GTNGRGS

SEQ ID NO: 1035 - protein, 9 aa, synthetic construct
  REGION 1..9: note = source = /note="Description of Artificial Sequence: Synthetic peptide"
ALWFSNHWV

SEQ ID NO: 1036 - protein, 214 aa, synthetic construct
  REGION 1..214: note = source = /note="Description of Artificial Sequence: Synthetic polypeptide"
QAVVTQEPSLTVSPGGTVTLTCGSSTGAVTTSNHANWVQQKPGQAFRGLIRGTNGRGSWTPARFSGSLLGGKAALTISGAQPEDEAEYYCALWFSNHWVFGGGTKLTVLQPKAAPSVTLFPPSSEELQANKATLVCLISDFYPGAVTVAWKADSSPVKAGVETTTPSKQSNNKYAASSYLSLTPEQWKSHRSYSCQVTHEGSTVEKTVAPTECS

SEQ ID NO: 1037 - protein, 119 aa, synthetic construct; identical to SEQ ID NO: 1027
  REGION 1..119: note = source = /note="Description of Artificial Sequence: Synthetic polypeptide"

SEQ ID NO: 1038 - protein, 10 aa, synthetic construct
  REGION 1..10: note = source = /note="Description of Artificial Sequence: Synthetic peptide"
GYTFTNYGMN

SEQ ID NO: 1039 - protein, 10 aa, synthetic construct
  REGION 1..10: note = source = /note="Description of Artificial Sequence: Synthetic peptide"
WINTYTGEPT

SEQ ID NO: 1040 - protein, 10 aa, synthetic construct
  REGION 1..10: note = source = /note="Description of Artificial Sequence: Synthetic peptide"
GNGYYVGMDY

SEQ ID NO: 1041 - protein, 446 aa, synthetic construct; identical to SEQ ID NO: 1031
  REGION 1..446: note = source = /note="Description of Artificial Sequence: Synthetic polypeptide"

SEQ ID NO: 1042 - protein, 109 aa, synthetic construct
  REGION 1..109: note = source = /note="Description of Artificial Sequence: Synthetic polypeptide"
QAVVTQEPSLTVSPGGTVTLTCGSSTGAVTTSNHANWVQQKPGQAFRGLIRGTNGRGSGVPARFSGSLLGGKAALTISGAQPEDEAEYYCALWFSNHWVFGGGTKLTVL

SEQ ID NO: 1043 - protein, 14 aa, synthetic construct
  REGION 1..14: note = source = /note="Description of Artificial Sequence: Synthetic peptide"
GSSTGAVTTSNHAN

SEQ ID NO: 1044 - protein, 7 aa, synthetic construct
  REGION 1..7: note = source = /note="Description of Artificial Sequence: Synthetic peptide"
GTNGRGS

SEQ ID NO: 1045 - protein, 9 aa, synthetic construct
  REGION 1..9: note = source = /note="Description of Artificial Sequence: Synthetic peptide"
ALWFSNHWV

SEQ ID NO: 1046 - protein, 214 aa, synthetic construct
  REGION 1..214: note = source = /note="Description of Artificial Sequence: Synthetic polypeptide"
QAVVTQEPSLTVSPGGTVTLTCGSSTGAVTTSNHANWVQQKPGQAFRGLIRGTNGRGSGVPARFSGSLLGGKAALTISGAQPEDEAEYYCALWFSNHWVFGGGTKLTVLQPKAAPSVTLFPPSSEELQANKATLVCLISDFYPGAVTVAWKADSSPVKAGVETTTPSKQSNNKYAASSYLSLTPEQWKSHRSYSCQVTHEGSTVEKTVAPTECS

SEQ ID NO: 1047 - protein, 119 aa, synthetic construct
  REGION 1..119: note = source = /note="Description of Artificial Sequence: Synthetic polypeptide"
QVQLVQSGAEVKKPGASVKISCKASGYTFTNYGMNWVRQAPGQGLEWMGWINTYTGEPTYAQKFQGRFTFTLDTSTSTAYLEISSLRSEDTAVYYCSRGNGYYVGMDYWGQGTLVTVSS

SEQ ID NO: 1048 - protein, 10 aa, synthetic construct
  REGION 1..10: note = source = /note="Description of Artificial Sequence: Synthetic peptide"
GYTFTNYGMN

SEQ ID NO: 1049 - protein, 10 aa, synthetic construct
  REGION 1..10: note = source = /note="Description of Artificial Sequence: Synthetic peptide"
WINTYTGEPT

SEQ ID NO: 1050 - protein, 10 aa, synthetic construct
  REGION 1..10: note = source = /note="Description of Artificial Sequence: Synthetic peptide"
GNGYYVGMDY

SEQ ID NO: 1051 - protein, 446 aa, synthetic construct
  REGION 1..446: note = source = /note="Description of Artificial Sequence: Synthetic polypeptide"
QVQLVQSGAEVKKPGASVKISCKASGYTFTNYGMNWVRQAPGQGLEWMGWINTYTGEPTYAQKFQGRFTFTLDTSTSTAYLEISSLRSEDTAVYYCSRGNGYYVGMDYWGQGTLVTVSSASTKGPSVFPLAPCSRSTSESTAALGCLVKDYFPEPVTVSWNSGALTSGVHTFPAVLQSSGLYSLSSVVTVPSSSLGTKTYTCNVDHKPSNTKVDKRVESKYGPPCPPCPAPEFLGGPSVFLFPPKPKDTLMISRTPEVTCVVVDVSQEDPEVQFNWYVDGVEVHNAKTKPREEQFNSTYRVVSVLTVLHQDWLNGKEYKCKVSNKGLPSSIEKTISKAKGQPREPQVYTLPPSQEEMTKNQVSLTCLVKGFYPSDIAVEWESNGQPENNYKTTPPVLDSDGSFFLYSRLTVDKSRWQEGNVFSCSVMHEALHNHYTQKSLSLSPGK

SEQ ID NO: 1052 - protein, 109 aa, synthetic construct; identical to SEQ ID NO: 1032
  REGION 1..109: note = source = /note="Description of Artificial Sequence: Synthetic polypeptide"

SEQ ID NO: 1053 - protein, 14 aa, synthetic construct
  REGION 1..14: note = source = /note="Description of Artificial Sequence: Synthetic peptide"
GSSTGAVTTSNHAN

SEQ ID NO: 1054 - protein, 7 aa, synthetic construct
  REGION 1..7: note = source = /note="Description of Artificial Sequence: Synthetic peptide"
GTNGRGS

SEQ ID NO: 1055 - protein, 9 aa, synthetic construct
  REGION 1..9: note = source = /note="Description of Artificial Sequence: Synthetic peptide"
ALWFSNHWV

SEQ ID NO: 1056 - protein, 214 aa, synthetic construct; identical to SEQ ID NO: 1036
  REGION 1..214: note = source = /note="Description of Artificial Sequence: Synthetic polypeptide"

SEQ ID NO: 1057 - protein, 119 aa, synthetic construct; identical to SEQ ID NO: 1047
  REGION 1..119: note = source = /note="Description of Artificial Sequence: Synthetic polypeptide"

SEQ ID NO: 1058 - protein, 10 aa, synthetic construct
  REGION 1..10: note = source = /note="Description of Artificial Sequence: Synthetic peptide"
GYTFTNYGMN

SEQ ID NO: 1059 - protein, 10 aa, synthetic construct
  REGION 1..10: note = source = /note="Description of Artificial Sequence: Synthetic peptide"
WINTYTGEPT

SEQ ID NO: 1060 - protein, 10 aa, synthetic construct
  REGION 1..10: note = source = /note="Description of Artificial Sequence: Synthetic peptide"
GNGYYVGMDY

SEQ ID NO: 1061 - protein, 446 aa, synthetic construct; identical to SEQ ID NO: 1051
  REGION 1..446: note = source = /note="Description of Artificial Sequence: Synthetic polypeptide"

SEQ ID NO: 1062 - protein, 109 aa, synthetic construct; identical to SEQ ID NO: 1042
  REGION 1..109: note = source = /note="Description of Artificial Sequence: Synthetic polypeptide"

SEQ ID NO: 1063 - protein, 14 aa, synthetic construct
  REGION 1..14: note = source = /note="Description of Artificial Sequence: Synthetic peptide"
GSSTGAVTTSNHAN

SEQ ID NO: 1064 - protein, 7 aa, synthetic construct
  REGION 1..7: note = source = /note="Description of Artificial Sequence: Synthetic peptide"
GTNGRGS

SEQ ID NO: 1065 - protein, 9 aa, synthetic construct
  REGION 1..9: note = source = /note="Description of Artificial Sequence: Synthetic peptide"
ALWFSNHWV

SEQ ID NO: 1066 - protein, 214 aa, synthetic construct; identical to SEQ ID NO: 1046
  REGION 1..214: note = source = /note="Description of Artificial Sequence: Synthetic polypeptide"

SEQ ID NO: 1067 - protein, 119 aa, synthetic construct
  REGION 1..119: note = source = /note="Description of Artificial Sequence: Synthetic polypeptide"
QVQLVQSGAEVKKPGASVKISCKASGYTFTNYGMNWVRQAPGQGLEWMGWINTYTGEPTYAQKFQGRFTFTLDASTSTAYLEISSLRSEDTAVYYCSRGNGYYVGMDYWGQGTLVTVSS

SEQ ID NO: 1068 - protein, 10 aa, synthetic construct
  REGION 1..10: note = source = /note="Description of Artificial Sequence: Synthetic peptide"
GYTFTNYGMN

SEQ ID NO: 1069 - protein, 10 aa, synthetic construct
  REGION 1..10: note = source = /note="Description of Artificial Sequence: Synthetic peptide"
WINTYTGEPT

SEQ ID NO: 1070 - protein, 10 aa, synthetic construct
  REGION 1..10: note = source = /note="Description of Artificial Sequence: Synthetic peptide"
GNGYYVGMDY

SEQ ID NO: 1071 - protein, 446 aa, synthetic construct; identical to SEQ ID NO: 1051
  REGION 1..446: note = source = /note="Description of Artificial Sequence: Synthetic polypeptide"

SEQ ID NO: 1072 - protein, 109 aa, synthetic construct; identical to SEQ ID NO: 1032
  REGION 1..109: note = source = /note="Description of Artificial Sequence: Synthetic polypeptide"

SEQ ID NO: 1073 - protein, 14 aa, synthetic construct
  REGION 1..14: note = source = /note="Description of Artificial Sequence: Synthetic peptide"
GSSTGAVTTSNHAN

SEQ ID NO: 1074 - protein, 7 aa, synthetic construct
  REGION 1..7: note = source = /note="Description of Artificial Sequence: Synthetic peptide"
GTNGRGS

SEQ ID NO: 1075 - protein, 9 aa, synthetic construct
  REGION 1..9: note = source = /note="Description of Artificial Sequence: Synthetic peptide"
ALWFSNHWV

SEQ ID NO: 1076 - protein, 214 aa, synthetic construct; identical to SEQ ID NO: 1036
  REGION 1..214: note = source = /note="Description of Artificial Sequence: Synthetic polypeptide"

SEQ ID NO: 1077 - protein, 119 aa, synthetic construct; identical to SEQ ID NO: 1067
  REGION 1..119: note = source = /note="Description of Artificial Sequence: Synthetic polypeptide"

SEQ ID NO: 1078 - protein, 10 aa, synthetic construct
  REGION 1..10: note = source = /note="Description of Artificial Sequence: Synthetic peptide"
GYTFTNYGMN

SEQ ID NO: 1079 - protein, 10 aa, synthetic construct
  REGION 1..10: note = source = /note="Description of Artificial Sequence: Synthetic peptide"
WINTYTGEPT

SEQ ID NO: 1080 - protein, 10 aa, synthetic construct
  REGION 1..10: note = source = /note="Description of Artificial Sequence: Synthetic peptide"
GNGYYVGMDY

SEQ ID NO: 1081 - protein, 446 aa, synthetic construct
  REGION 1..446: note = source = /note="Description of Artificial Sequence: Synthetic polypeptide"
QVQLVQSGAEVKKPGASVKISCKASGYTFTNYGMNWVRQAPGQGLEWMGWINTYTGEPTYAQKFQGRFTFTLDASTSTAYLEISSLRSEDTAVYYCSRGNGYYVGMDYWGQGTLVTVSSASTKGPSVFPLAPCSRSTSESTAALGCLVKDYFPEPVTVSWNSGALTSGVHTFPAVLQSSGLYSLSSVVTVPSSSLGTKTYTCNVDHKPSNTKVDKRVESKYGPPCPPCPAPEFLGGPSVFLFPPKPKDTLMISRTPEVTCVVVDVSQEDPEVQFNWYVDGVEVHNAKTKPREEQFNSTYRVVSVLTVLHQDWLNGKEYKCKVSNKGLPSSIEKTISKAKGQPREPQVYTLPPSQEEMTKNQVSLTCLVKGFYPSDIAVEWESNGQPENNYKTTPPVLDSDGSFFLYSRLTVDKSRWQEGNVFSCSVMHEALHNHYTQKSLSLSPGK

SEQ ID NO: 1082 - protein, 109 aa, synthetic construct; identical to SEQ ID NO: 1042
  REGION 1..109: note = source = /note="Description of Artificial Sequence: Synthetic polypeptide"

SEQ ID NO: 1083 - protein, 14 aa, synthetic construct
  REGION 1..14: note = source = /note="Description of Artificial Sequence: Synthetic peptide"
GSSTGAVTTSNHAN

SEQ ID NO: 1084 - protein, 7 aa, synthetic construct
  REGION 1..7: note = source = /note="Description of Artificial Sequence: Synthetic peptide"
GTNGRGS

SEQ ID NO: 1085 - protein, 9 aa, synthetic construct
  REGION 1..9: note = source = /note="Description of Artificial Sequence: Synthetic peptide"
ALWFSNHWV

SEQ ID NO: 1086 - protein, 214 aa, synthetic construct; identical to SEQ ID NO: 1046
  REGION 1..214: note = source = /note="Description of Artificial Sequence: Synthetic polypeptide"

SEQ ID NO: 1087 - protein, 119 aa, synthetic construct
  REGION 1..119: note = source = /note="Description of Artificial Sequence: Synthetic polypeptide"
EVQLVESGGGLVQPGGSLRLSCAASGFTFSSYIMSWVRQAPGKGLEWVSTISGGGTNTYYADSVKGRFTISRDNSKNTLYLQMNSLRAEDTAVYYCARWLLSYYAMDYWGQGTLVTVSS

SEQ ID NO: 1088 - protein, 10 aa, synthetic construct
  REGION 1..10: note = source = /note="Description of Artificial Sequence: Synthetic peptide"
GFTFSSYIMS

SEQ ID NO: 1089 - protein, 10 aa, synthetic construct
  REGION 1..10: note = source = /note="Description of Artificial Sequence: Synthetic peptide"
TISGGGTNTY

SEQ ID NO: 1090 - protein, 10 aa, synthetic construct
  REGION 1..10: note = source = /note="Description of Artificial Sequence: Synthetic peptide"
WLLSYYAMDY

SEQ ID NO: 1091 - protein, 446 aa, synthetic construct
  REGION 1..446: note = source = /note="Description of Artificial Sequence: Synthetic polypeptide"
EVQLVESGGGLVQPGGSLRLSCAASGFTFSSYIMSWVRQAPGKGLEWVSTISGGGTNTYYADSVKGRFTISRDNSKNTLYLQMNSLRAEDTAVYYCARWLLSYYAMDYWGQGTLVTVSSASTKGPSVFPLAPCSRSTSESTAALGCLVKDYFPEPVTVSWNSGALTSGVHTFPAVLQSSGLYSLSSVVTVPSSSLGTKTYTCNVDHKPSNTKVDKRVESKYGPPCPPCPAPEFLGGPSVFLFPPKPKDTLMISRTPEVTCVVVDVSQEDPEVQFNWYVDGVEVHNAKTKPREEQFNSTYRVVSVLTVLHQDWLNGKEYKCKVSNKGLPSSIEKTISKAKGQPREPQVYTLPPSQEEMTKNQVSLTCLVKGFYPSDIAVEWESNGQPENNYKTTPPVLDSDGSFFLYSRLTVDKSRWQEGNVFSCSVMHEALHNHYTQKSLSLSPGK

SEQ ID NO: 1092 - protein, 107 aa, synthetic construct
  REGION 1..107: note = source = /note="Description of Artificial Sequence: Synthetic polypeptide"
DIQMTQSPSSLSASVGDRVTITCRASQNINVWLTWYQQKPGKAPKLLIYKASNLHTGVPSRFSGSGSGTDFTLTISSLQPEDFATYYCQQGQSYPYTFGQGTKLEIK

SEQ ID NO: 1093 - protein, 11 aa, synthetic construct
  REGION 1..11: note = source = /note="Description of Artificial Sequence: Synthetic peptide"
RASQNINVWLT

SEQ ID NO: 1094 - protein, 7 aa, synthetic construct
  REGION 1..7: note = source = /note="Description of Artificial Sequence: Synthetic peptide"
KASNLHT

SEQ ID NO: 1095 - protein, 9 aa, synthetic construct
  REGION 1..9: note = source = /note="Description of Artificial Sequence: Synthetic peptide"
QQGQSYPYT

SEQ ID NO: 1096 - protein, 214 aa, synthetic construct
  REGION 1..214: note = source = /note="Description of Artificial Sequence: Synthetic polypeptide"
DIQMTQSPSSLSASVGDRVTITCRASQNINVWLTWYQQKPGKAPKLLIYKASNLHTGVPSRFSGSGSGTDFTLTISSLQPEDFATYYCQQGQSYPYTFGQGTKLEIKRTVAAPSVFIFPPSDEQLKSGTASVVCLLNNFYPREAKVQWKVDNALQSGNSQESVTEQDSKDSTYSLSSTLTLSKADYEKHKVYACEVTHQGLSSPVTKSFNRGEC

SEQ ID NO: 1097 - protein, 119 aa, synthetic construct
  REGION 1..119: note = source = /note="Description of Artificial Sequence: Synthetic polypeptide"
EVQLVESGGGLVQPGGSLRLSCAASGFTFSSYIMSWVRQAPGKGLEWVSTISGGGTNTYYADSVKGRFTISRDNSKNTLYLQMNSLRAEDTAVYYCAKWLLSYYAMDYWGQGTLVTVSS

SEQ ID NO: 1098 - protein, 10 aa, synthetic construct
  REGION 1..10: note = source = /note="Description of Artificial Sequence: Synthetic peptide"
GFTFSSYIMS

SEQ ID NO: 1099 - protein, 10 aa, synthetic construct
  REGION 1..10: note = source = /note="Description of Artificial Sequence: Synthetic peptide"
TISGGGTNTY

SEQ ID NO: 1100 - protein, 10 aa, synthetic construct
  REGION 1..10: note = source = /note="Description of Artificial Sequence: Synthetic peptide"
WLLSYYAMDY

SEQ ID NO: 1101 - protein, 446 aa, synthetic construct
  REGION 1..446: note = source = /note="Description of Artificial Sequence: Synthetic polypeptide"
EVQLVESGGGLVQPGGSLRLSCAASGFTFSSYIMSWVRQAPGKGLEWVSTISGGGTNTYYADSVKGRFTISRDNSKNTLYLQMNSLRAEDTAVYYCAKWLLSYYAMDYWGQGTLVTVSSASTKGPSVFPLAPCSRSTSESTAALGCLVKDYFPEPVTVSWNSGALTSGVHTFPAVLQSSGLYSLSSVVTVPSSSLGTKTYTCNVDHKPSNTKVDKRVESKYGPPCPPCPAPEFLGGPSVFLFPPKPKDTLMISRTPEVTCVVVDVSQEDPEVQFNWYVDGVEVHNAKTKPREEQFNSTYRVVSVLTVLHQDWLNGKEYKCKVSNKGLPSSIEKTISKAKGQPREPQVYTLPPSQEEMTKNQVSLTCLVKGFYPSDIAVEWESNGQPENNYKTTPPVLDSDGSFFLYSRLTVDKSRWQEGNVFSCSVMHEALHNHYTQKSLSLSPGK

SEQ ID NO: 1102 - protein, 107 aa, synthetic construct; identical to SEQ ID NO: 1092
  REGION 1..107: note = source = /note="Description of Artificial Sequence: Synthetic polypeptide"

SEQ ID NO: 1103 - protein, 11 aa, synthetic construct
  REGION 1..11: note = source = /note="Description of Artificial Sequence: Synthetic peptide"
RASQNINVWLT

SEQ ID NO: 1104 - protein, 7 aa, synthetic construct
  REGION 1..7: note = source = /note="Description of Artificial Sequence: Synthetic peptide"
KASNLHT

SEQ ID NO: 1105 - protein, 9 aa, synthetic construct
  REGION 1..9: note = source = /note="Description of Artificial Sequence: Synthetic peptide"
QQGQSYPYT

SEQ ID NO: 1106 - protein, 214 aa, synthetic construct; identical to SEQ ID NO: 1096
  REGION 1..214: note = source = /note="Description of Artificial Sequence: Synthetic polypeptide"

SEQ ID NO: 1107 - protein, 119 aa, synthetic construct
  REGION 1..119: note = source = /note="Description of Artificial Sequence: Synthetic polypeptide"
EVQLVESGGGLVQPGGSLRLSCAASGFTFSSYIMSWVRQAPGKGLEWVATISGGGTNTYYADSVKGRFTISRDNSKNTLYLQMNSLRAEDTAVYYCAKWLLSYYAMDYWGQGTLVTVSS

SEQ ID NO: 1108 - protein, 10 aa, synthetic construct
  REGION 1..10: note = source = /note="Description of Artificial Sequence: Synthetic peptide"
GFTFSSYIMS

SEQ ID NO: 1109 - protein, 10 aa, synthetic construct
  REGION 1..10: note = source = /note="Description of Artificial Sequence: Synthetic peptide"
TISGGGTNTY

SEQ ID NO: 1110 - protein, 10 aa, synthetic construct
  REGION 1..10: note = source = /note="Description of Artificial Sequence: Synthetic peptide"
WLLSYYAMDY

SEQ ID NO: 1111 - protein, 446 aa, synthetic construct
  REGION 1..446: note = source = /note="Description of Artificial Sequence: Synthetic polypeptide"
EVQLVESGGGLVQPGGSLRLSCAASGFTFSSYIMSWVRQAPGKGLEWVATISGGGTNTYYADSVKGRFTISRDNSKNTLYLQMNSLRAEDTAVYYCAKWLLSYYAMDYWGQGTLVTVSSASTKGPSVFPLAPCSRSTSESTAALGCLVKDYFPEPVTVSWNSGALTSGVHTFPAVLQSSGLYSLSSVVTVPSSSLGTKTYTCNVDHKPSNTKVDKRVESKYGPPCPPCPAPEFLGGPSVFLFPPKPKDTLMISRTPEVTCVVVDVSQEDPEVQFNWYVDGVEVHNAKTKPREEQFNSTYRVVSVLTVLHQDWLNGKEYKCKVSNKGLPSSIEKTISKAKGQPREPQVYTLPPSQEEMTKNQVSLTCLVKGFYPSDIAVEWESNGQPENNYKTTPPVLDSDGSFFLYSRLTVDKSRWQEGNVFSCSVMHEALHNHYTQKSLSLSPGK

SEQ ID NO: 1112 - protein, 107 aa, synthetic construct; identical to SEQ ID NO: 1092
  REGION 1..107: note = source = /note="Description of Artificial Sequence: Synthetic polypeptide"

SEQ ID NO: 1113 - protein, 11 aa, synthetic construct
  REGION 1..11: note = source = /note="Description of Artificial Sequence: Synthetic peptide"
RASQNINVWLT

SEQ ID NO: 1114 - protein, 7 aa, synthetic construct
  REGION 1..7: note = source = /note="Description of Artificial Sequence: Synthetic peptide"
KASNLHT

SEQ ID NO: 1115 - protein, 9 aa, synthetic construct
  REGION 1..9: note = source = /note="Description of Artificial Sequence: Synthetic peptide"
QQGQSYPYT

SEQ ID NO: 1116 - protein, 214 aa, synthetic construct; identical to SEQ ID NO: 1096
  REGION 1..214: note = source = /note="Description of Artificial Sequence: Synthetic polypeptide"

SEQ ID NO: 1117 - protein, 119 aa, synthetic construct; identical to SEQ ID NO: 1097
  REGION 1..119: note = source = /note="Description of Artificial Sequence: Synthetic polypeptide"

SEQ ID NO: 1118 - protein, 10 aa, synthetic construct
  REGION 1..10: note = source = /note="Description of Artificial Sequence: Synthetic peptide"
GFTFSSYIMS

SEQ ID NO: 1119 - protein, 10 aa, synthetic construct
  REGION 1..10: note = source = /note="Description of Artificial Sequence: Synthetic peptide"
TISGGGTNTY

SEQ ID NO: 1120 - protein, 10 aa, synthetic construct
  REGION 1..10: note = source = /note="Description of Artificial Sequence: Synthetic peptide"
WLLSYYAMDY

SEQ ID NO: 1121 - protein, 446 aa, synthetic construct; identical to SEQ ID NO: 1101
  REGION 1..446: note = source = /note="Description of Artificial Sequence: Synthetic polypeptide"

SEQ ID NO: 1122 - protein, 107 aa, synthetic construct
  REGION 1..107: note = source = /note="Description of Artificial Sequence: Synthetic polypeptide"
DIQMTQSPSSLSASVGDRITITCRASQNINVWLTWYQQKPGKAPKLLIYKASNLHTGVPSRFSGSGSGTDFTLTISSLQPEDFATYYCQQGQSYPYTFGQGTKLEIK

SEQ ID NO: 1123 - protein, 11 aa, synthetic construct
  REGION 1..11: note = source = /note="Description of Artificial Sequence: Synthetic peptide"
RASQNINVWLT

SEQ ID NO: 1124 - protein, 7 aa, synthetic construct
  REGION 1..7: note = source = /note="Description of Artificial Sequence: Synthetic peptide"
KASNLHT

SEQ ID NO: 1125 - protein, 9 aa, synthetic construct
  REGION 1..9: note = source = /note="Description of Artificial Sequence: Synthetic peptide"
QQGQSYPYT

SEQ ID NO: 1126 - protein, 214 aa, synthetic construct
  REGION 1..214: note = source = /note="Description of Artificial Sequence: Synthetic polypeptide"
DIQMTQSPSSLSASVGDRITITCRASQNINVWLTWYQQKPGKAPKLLIYKASNLHTGVPSRFSGSGSGTDFTLTISSLQPEDFATYYCQQGQSYPYTFGQGTKLEIKRTVAAPSVFIFPPSDEQLKSGTASVVCLLNNFYPREAKVQWKVDNALQSGNSQESVTEQDSKDSTYSLSSTLTLSKADYEKHKVYACEVTHQGLSSPVTKSFNRGEC

SEQ ID NO: 1127 - protein, 119 aa, synthetic construct; identical to SEQ ID NO: 1107
  REGION 1..119: note = source = /note="Description of Artificial Sequence: Synthetic polypeptide"

SEQ ID NO: 1128 - protein, 10 aa, synthetic construct
  REGION 1..10: note = source = /note="Description of Artificial Sequence: Synthetic peptide"
GFTFSSYIMS

SEQ ID NO: 1129 - protein, 10 aa, synthetic construct
  REGION 1..10: note = source = /note="Description of Artificial Sequence: Synthetic peptide"
TISGGGTNTY

SEQ ID NO: 1130 - protein, 10 aa, synthetic construct
  REGION 1..10: note = source = /note="Description of Artificial Sequence: Synthetic peptide"
WLLSYYAMDY

SEQ ID NO: 1131 - protein, 446 aa, synthetic construct; identical to SEQ ID NO: 1111
  REGION 1..446: note = source = /note="Description of Artificial Sequence: Synthetic polypeptide"

SEQ ID NO: 1132 - protein, 107 aa, synthetic construct; identical to SEQ ID NO: 1122
  REGION 1..107: note = source = /note="Description of Artificial Sequence: Synthetic polypeptide"

SEQ ID NO: 1133 - protein, 11 aa, synthetic construct
  REGION 1..11: note = source = /note="Description of Artificial Sequence: Synthetic peptide"
RASQNINVWLT

SEQ ID NO: 1134 - protein, 7 aa, synthetic construct
  REGION 1..7: note = source = /note="Description of Artificial Sequence: Synthetic peptide"
KASNLHT

SEQ ID NO: 1135 - protein, 9 aa, synthetic construct
  REGION 1..9: note = source = /note="Description of Artificial Sequence: Synthetic peptide"
QQGQSYPYT

SEQ ID NO: 1136 - protein, 214 aa, synthetic construct; identical to SEQ ID NO: 1126
  REGION 1..214: note = source = /note="Description of Artificial Sequence: Synthetic polypeptide"

SEQ ID NO: 1137 - protein, 119 aa, synthetic construct; identical to SEQ ID NO: 1097
  REGION 1..119: note = source = /note="Description of Artificial Sequence: Synthetic polypeptide"

SEQ ID NO: 1138 - protein, 10 aa, synthetic construct
  REGION 1..10: note = source = /note="Description of Artificial Sequence: Synthetic peptide"
GFTFSSYIMS

SEQ ID NO: 1139 - protein, 10 aa, synthetic construct
  REGION 1..10: note = source = /note="Description of Artificial Sequence: Synthetic peptide"
TISGGGTNTY

SEQ ID NO: 1140 - protein, 10 aa, synthetic construct
  REGION 1..10: note = source = /note="Description of Artificial Sequence: Synthetic peptide"
WLLSYYAMDY

SEQ ID NO: 1141 - protein, 446 aa, synthetic construct; identical to SEQ ID NO: 1101
  REGION 1..446: note = source = /note="Description of Artificial Sequence: Synthetic polypeptide"

SEQ ID NO: 1142 - protein, 107 aa, synthetic construct
  REGION 1..107: note = source = /note="Description of Artificial Sequence: Synthetic polypeptide"
DIQMTQSPSSLSASVGDRVTITCRASQNINVWLTWYQQKPGKAPKLLIYKASKSHTGVPSRFSGSGSGTDFTLTISSLQPEDFATYYCQQGQSYPYTFGQGTKLEIK

SEQ ID NO: 1143 - protein, 11 aa, synthetic construct
  REGION 1..11: note = source = /note="Description of Artificial Sequence: Synthetic peptide"
RASQNINVWLT

SEQ ID NO: 1144 - protein, 7 aa, synthetic construct
  REGION 1..7: note = source = /note="Description of Artificial Sequence: Synthetic peptide"
KASKSHT

SEQ ID NO: 1145 - protein, 9 aa, synthetic construct
  REGION 1..9: note = source = /note="Description of Artificial Sequence: Synthetic peptide"
QQGQSYPYT

SEQ ID NO: 1146 - protein, 214 aa, synthetic construct
  REGION 1..214: note = source = /note="Description of Artificial Sequence: Synthetic polypeptide"
DIQMTQSPSSLSASVGDRVTITCRASQNINVWLTWYQQKPGKAPKLLIYKASKSHTGVPSRFSGSGSGTDFTLTISSLQPEDFATYYCQQGQSYPYTFGQGTKLEIKRTVAAPSVFIFPPSDEQLKSGTASVVCLLNNFYPREAKVQWKVDNALQSGNSQESVTEQDSKDSTYSLSSTLTLSKADYEKHKVYACEVTHQGLSSPVTKSFNRGEC

SEQ ID NO: 1147 - protein, 119 aa, synthetic construct; identical to SEQ ID NO: 1107
  REGION 1..119: note = source = /note="Description of Artificial Sequence: Synthetic polypeptide"

SEQ ID NO: 1148 - protein, 10 aa, synthetic construct
  REGION 1..10: note = source = /note="Description of Artificial Sequence: Synthetic peptide"
GFTFSSYIMS

SEQ ID NO: 1149 - protein, 10 aa, synthetic construct
  REGION 1..10: note = source = /note="Description of Artificial Sequence: Synthetic peptide"
TISGGGTNTY

SEQ ID NO: 1150 - protein, 10 aa, synthetic construct
  REGION 1..10: note = source = /note="Description of Artificial Sequence: Synthetic peptide"
WLLSYYAMDY

SEQ ID NO: 1151 - protein, 446 aa, synthetic construct; identical to SEQ ID NO: 1111
  REGION 1..446: note = source = /note="Description of Artificial Sequence: Synthetic polypeptide"

SEQ ID NO: 1152 - protein, 107 aa, synthetic construct; identical to SEQ ID NO: 1142
  REGION 1..107: note = source = /note="Description of Artificial Sequence: Synthetic polypeptide"

SEQ ID NO: 1153 - protein, 11 aa, synthetic construct
  REGION 1..11: note = source = /note="Description of Artificial Sequence: Synthetic peptide"
RASQNINVWLT

SEQ ID NO: 1154 - protein, 7 aa, synthetic construct
  REGION 1..7: note = source = /note="Description of Artificial Sequence: Synthetic peptide"
KASKSHT

SEQ ID NO: 1155 - protein, 9 aa, synthetic construct
  REGION 1..9: note = source = /note="Description of Artificial Sequence: Synthetic peptide"
QQGQSYPYT

SEQ ID NO: 1156 - protein, 214 aa, synthetic construct; identical to SEQ ID NO: 1146
  REGION 1..214: note = source = /note="Description of Artificial Sequence: Synthetic polypeptide"

SEQ ID NO: 1157 - protein, 119 aa, synthetic construct; identical to SEQ ID NO: 1097
  REGION 1..119: note = source = /note="Description of Artificial Sequence: Synthetic polypeptide"

SEQ ID NO: 1158 - protein, 10 aa, synthetic construct
  REGION 1..10: note = source = /note="Description of Artificial Sequence: Synthetic peptide"
GFTFSSYIMS

SEQ ID NO: 1159 - protein, 10 aa, synthetic construct
  REGION 1..10: note = source = /note="Description of Artificial Sequence: Synthetic peptide"
TISGGGTNTY

SEQ ID NO: 1160 - protein, 10 aa, synthetic construct
  REGION 1..10: note = source = /note="Description of Artificial Sequence: Synthetic peptide"
WLLSYYAMDY

SEQ ID NO: 1161 - protein, 446 aa, synthetic construct; identical to SEQ ID NO: 1101
  REGION 1..446: note = source = /note="Description of Artificial Sequence: Synthetic polypeptide"

SEQ ID NO: 1162 - protein, 107 aa, synthetic construct
  REGION 1..107: note = source = /note="Description of Artificial Sequence: Synthetic polypeptide"
DIQMTQSPSSLSASVGDRITITCRASQNINVWLTWYQQKPGKAPKLLIYKASKSHTGVPSRFSGSGSGTDFTLTISSLQPEDFATYYCQQGQSYPYTFGQGTKLEIK

SEQ ID NO: 1163 - protein, 11 aa, synthetic construct
  REGION 1..11: note = source = /note="Description of Artificial Sequence: Synthetic peptide"
RASQNINVWLT

SEQ ID NO: 1164 - protein, 7 aa, synthetic construct
  REGION 1..7: note = source = /note="Description of Artificial Sequence: Synthetic peptide"
KASKSHT

SEQ ID NO: 1165 - protein, 9 aa, synthetic construct
  REGION 1..9: note = source = /note="Description of Artificial Sequence: Synthetic peptide"
QQGQSYPYT

SEQ ID NO: 1166 - protein, 214 aa, synthetic construct
  REGION 1..214: note = source = /note="Description of Artificial Sequence: Synthetic polypeptide"
DIQMTQSPSSLSASVGDRITITCRASQNINVWLTWYQQKPGKAPKLLIYKASKSHTGVPSRFSGSGSGTDFTLTISSLQPEDFATYYCQQGQSYPYTFGQGTKLEIKRTVAAPSVFIFPPSDEQLKSGTASVVCLLNNFYPREAKVQWKVDNALQSGNSQESVTEQDSKDSTYSLSSTLTLSKADYEKHKVYACEVTHQGLSSPVTKSFNRGEC

SEQ ID NO: 1167 - protein, 119 aa, synthetic construct; identical to SEQ ID NO: 1107
  REGION 1..119: note = source = /note="Description of Artificial Sequence: Synthetic polypeptide"

SEQ ID NO: 1168 - protein, 10 aa, synthetic construct
  REGION 1..10: note = source = /note="Description of Artificial Sequence: Synthetic peptide"
GFTFSSYIMS

SEQ ID NO: 1169 - protein, 10 aa, synthetic construct
  REGION 1..10: note = source = /note="Description of Artificial Sequence: Synthetic peptide"
TISGGGTNTY

SEQ ID NO: 1170 - protein, 10 aa, synthetic construct
  REGION 1..10: note = source = /note="Description of Artificial Sequence: Synthetic peptide"
WLLSYYAMDY

SEQ ID NO: 1171 - protein, 446 aa, synthetic construct; identical to SEQ ID NO: 1111
  REGION 1..446: note = source = /note="Description of Artificial Sequence: Synthetic polypeptide"

SEQ ID NO: 1172 - protein, 107 aa, synthetic construct; identical to SEQ ID NO: 1162
  REGION 1..107: note = source = /note="Description of Artificial Sequence: Synthetic polypeptide"

SEQ ID NO: 1173 - protein, 11 aa, synthetic construct
  REGION 1..11: note = source = /note="Description of Artificial Sequence: Synthetic peptide"
RASQNINVWLT

SEQ ID NO: 1174 - protein, 7 aa, synthetic construct
  REGION 1..7: note = source = /note="Description of Artificial Sequence: Synthetic peptide"
KASKSHT

SEQ ID NO: 1175 - protein, 9 aa, synthetic construct
  REGION 1..9: note = source = /note="Description of Artificial Sequence: Synthetic peptide"
QQGQSYPYT

SEQ ID NO: 1176 - protein, 214 aa, synthetic construct; identical to SEQ ID NO: 1166
  REGION 1..214: note = source = /note="Description of Artificial Sequence: Synthetic polypeptide"

SEQ ID NO: 1177 - protein, 119 aa, synthetic construct
  REGION 1..119: note = source = /note="Description of Artificial Sequence: Synthetic polypeptide"
QVQLVQSGAEVKKPGASVKVSCKASGYTITNYGMNWVRQAPGQGLEWMGWINTYTGEPTYAQKFQGRVTMTRDTSTSTVYMELSSLRSEDTAVYYCARGNGNPLGMDYWGQGTLVTVSS

SEQ ID NO: 1178 - protein, 10 aa, synthetic construct
  REGION 1..10: note = source = /note="Description of Artificial Sequence: Synthetic peptide"
GYTITNYGMN

SEQ ID NO: 1179 - protein, 10 aa, synthetic construct
  REGION 1..10: note = source = /note="Description of Artificial Sequence: Synthetic peptide"
WINTYTGEPT

SEQ ID NO: 1180 - protein, 10 aa, synthetic construct
  REGION 1..10: note = source = /note="Description of Artificial Sequence: Synthetic peptide"
GNGNPLGMDY

SEQ ID NO: 1181 - protein, 446 aa, synthetic construct
  REGION 1..446: note = source = /note="Description of Artificial Sequence: Synthetic polypeptide"
QVQLVQSGAEVKKPGASVKVSCKASGYTITNYGMNWVRQAPGQGLEWMGWINTYTGEPTYAQKFQGRVTMTRDTSTSTVYMELSSLRSEDTAVYYCARGNGNPLGMDYWGQGTLVTVSSASTKGPSVFPLAPCSRSTSESTAALGCLVKDYFPEPVTVSWNSGALTSGVHTFPAVLQSSGLYSLSSVVTVPSSSLGTKTYTCNVDHKPSNTKVDKRVESKYGPPCPPCPAPEFLGGPSVFLFPPKPKDTLMISRTPEVTCVVVDVSQEDPEVQFNWYVDGVEVHNAKTKPREEQFNSTYRVVSVLTVLHQDWLNGKEYKCKVSNKGLPSSIEKTISKAKGQPREPQVYTLPPSQEEMTKNQVSLTCLVKGFYPSDIAVEWESNGQPENNYKTTPPVLDSDGSFFLYSRLTVDKSRWQEGNVFSCSVMHEALHNHYTQKSLSLSPGK

SEQ ID NO: 1182 - protein, 106 aa, synthetic construct
  REGION 1..106: note = source = /note="Description of Artificial Sequence: Synthetic polypeptide"
EIVLTQSPATLSLSPGERATLSCGNGNPLGMDYWYQQKPGQAPRLLIYDTSKLASGIPARFSGSGSGTDFTLTISSLEPEDFAVYYCFQGSGYPLTFGQGTKLEIK

SEQ ID NO: 1183 - protein, 10 aa, synthetic construct
  REGION 1..10: note = source = /note="Description of Artificial Sequence: Synthetic peptide"
GNGNPLGMDY

SEQ ID NO: 1184 - protein, 7 aa, synthetic construct
  REGION 1..7: note = source = /note="Description of Artificial Sequence: Synthetic peptide"
DTSKLAS

SEQ ID NO: 1185 - protein, 9 aa, synthetic construct
  REGION 1..9: note = source = /note="Description of Artificial Sequence: Synthetic peptide"
FQGSGYPLT

SEQ ID NO: 1186 - protein, 213 aa, synthetic construct
  REGION 1..213: note = source = /note="Description of Artificial Sequence: Synthetic polypeptide"
EIVLTQSPATLSLSPGERATLSCGNGNPLGMDYWYQQKPGQAPRLLIYDTSKLASGIPARFSGSGSGTDFTLTISSLEPEDFAVYYCFQGSGYPLTFGQGTKLEIKRTVAAPSVFIFPPSDEQLKSGTASVVCLLNNFYPREAKVQWKVDNALQSGNSQESVTEQDSKDSTYSLSSTLTLSKADYEKHKVYACEVTHQGLSSPVTKSFNRGEC

SEQ ID NO: 1187 - protein, 119 aa, synthetic construct
  REGION 1..119: note = source = /note="Description of Artificial Sequence: Synthetic polypeptide"
QVQLVQSGAEVKKPGASVKVSCKASGYTITNYGMNWVRQAPGQGLEWMGWINTYTGEPTYAQKFQGRFTMTLDTSTSTVYMELSSLRSEDTAVYYCARGNGNPLGMDYWGQGTLVTVSS

SEQ ID NO: 1188 - protein, 10 aa, synthetic construct
  REGION 1..10: note = source = /note="Description of Artificial Sequence: Synthetic peptide"
GYTITNYGMN

SEQ ID NO: 1189 - protein, 10 aa, synthetic construct
  REGION 1..10: note = source = /note="Description of Artificial Sequence: Synthetic peptide"
WINTYTGEPT

SEQ ID NO: 1190 - protein, 10 aa, synthetic construct
  REGION 1..10: note = source = /note="Description of Artificial Sequence: Synthetic peptide"
GNGNPLGMDY

SEQ ID NO: 1191 - protein, 446 aa, synthetic construct
  REGION 1..446: note = source = /note="Description of Artificial Sequence: Synthetic polypeptide"
QVQLVQSGAEVKKPGASVKVSCKASGYTITNYGMNWVRQAPGQGLEWMGWINTYTGEPTYAQKFQGRFTMTLDTSTSTVYMELSSLRSEDTAVYYCARGNGNPLGMDYWGQGTLVTVSSASTKGPSVFPLAPCSRSTSESTAALGCLVKDYFPEPVTVSWNSGALTSGVHTFPAVLQSSGLYSLSSVVTVPSSSLGTKTYTCNVDHKPSNTKVDKRVESKYGPPCPPCPAPEFLGGPSVFLFPPKPKDTLMISRTPEVTCVVVDVSQEDPEVQFNWYVDGVEVHNAKTKPREEQFNSTYRVVSVLTVLHQDWLNGKEYKCKVSNKGLPSSIEKTISKAKGQPREPQVYTLPPSQEEMTKNQVSLTCLVKGFYPSDIAVEWESNGQPENNYKTTPPVLDSDGSFFLYSRLTVDKSRWQEGNVFSCSVMHEALHNHYTQKSLSLSPGK

SEQ ID NO: 1192 - protein, 106 aa, synthetic construct
  REGION 1..106: note = source = /note="Description of Artificial Sequence: Synthetic polypeptide"
EIVLTQSPATLSLSPGERATLSCGNGNPLGMDYWYQQKPGQAPRLLIYDTSKLASGIPARFSGSGSGTDYTLTISSLEPEDFAVYYCFQGSGYPLTFGQGTKLEIK

SEQ ID NO: 1193 - protein, 10 aa, synthetic construct
  REGION 1..10: note = source = /note="Description of Artificial Sequence: Synthetic peptide"
GNGNPLGMDY

SEQ ID NO: 1194 - protein, 7 aa, synthetic construct
  REGION 1..7: note = source = /note="Description of Artificial Sequence: Synthetic peptide"
DTSKLAS

SEQ ID NO: 1195 - protein, 9 aa, synthetic construct
  REGION 1..9: note = source = /note="Description of Artificial Sequence: Synthetic peptide"
FQGSGYPLT

SEQ ID NO: 1196 - protein, 213 aa, synthetic construct
  REGION 1..213: note = source = /note="Description of Artificial Sequence: Synthetic polypeptide"
EIVLTQSPATLSLSPGERATLSCGNGNPLGMDYWYQQKPGQAPRLLIYDTSKLASGIPARFSGSGSGTDYTLTISSLEPEDFAVYYCFQGSGYPLTFGQGTKLEIKRTVAAPSVFIFPPSDEQLKSGTASVVCLLNNFYPREAKVQWKVDNALQSGNSQESVTEQDSKDSTYSLSSTLTLSKADYEKHKVYACEVTHQGLSSPVTKSFNRGEC

SEQ ID NO: 1197 - protein, 119 aa, synthetic construct; identical to SEQ ID NO: 1187
  REGION 1..119: note = source = /note="Description of Artificial Sequence: Synthetic polypeptide"

SEQ ID NO: 1198 - protein, 10 aa, synthetic construct
  REGION 1..10: note = source = /note="Description of Artificial Sequence: Synthetic peptide"
GYTITNYGMN

SEQ ID NO: 1199 - protein, 10 aa, synthetic construct
  REGION 1..10: note = source = /note="Description of Artificial Sequence: Synthetic peptide"
WINTYTGEPT

SEQ ID NO: 1200 - protein, 10 aa, synthetic construct
  REGION 1..10: note = source = /note="Description of Artificial Sequence: Synthetic peptide"
GNGNPLGMDY

SEQ ID NO: 1201 - protein, 446 aa, synthetic construct; identical to SEQ ID NO: 1191
  REGION 1..446: note = source = /note="Description of Artificial Sequence: Synthetic polypeptide"

SEQ ID NO: 1202 - protein, 106 aa, synthetic construct
  REGION 1..106: note = source = /note="Description of Artificial Sequence: Synthetic polypeptide"
EIVLTQSPATLSLSPGERATLSCGNGNPLGMDYWYQQKPGQAPRLWIYDTSKLASGVPARFSGSGSGTDYTLTISSLEPEDFAVYYCFQGSGYPLTFGQGTKLEIK

SEQ ID NO: 1203 - protein, 10 aa, synthetic construct
  REGION 1..10: note = source = /note="Description of Artificial Sequence: Synthetic peptide"
GNGNPLGMDY

SEQ ID NO: 1204 - protein, 7 aa, synthetic construct
  REGION 1..7: note = source = /note="Description of Artificial Sequence: Synthetic peptide"
DTSKLAS

SEQ ID NO: 1205 - protein, 9 aa, synthetic construct
  REGION 1..9: note = source = /note="Description of Artificial Sequence: Synthetic peptide"
FQGSGYPLT

SEQ ID NO: 1206 - protein, 213 aa, synthetic construct
  REGION 1..213: note = source = /note="Description of Artificial Sequence: Synthetic polypeptide"
EIVLTQSPATLSLSPGERATLSCGNGNPLGMDYWYQQKPGQAPRLWIYDTSKLASGVPARFSGSGSGTDYTLTISSLEPEDFAVYYCFQGSGYPLTFGQGTKLEIKRTVAAPSVFIFPPSDEQLKSGTASVVCLLNNFYPREAKVQWKVDNALQSGNSQESVTEQDSKDSTYSLSSTLTLSKADYEKHKVYACEVTHQGLSSPVTKSFNRGEC

SEQ ID NO: 1207 - protein, 119 aa, synthetic construct; identical to SEQ ID NO: 1187
  REGION 1..119: note = source = /note="Description of Artificial Sequence: Synthetic polypeptide"

SEQ ID NO: 1208 - protein, 10 aa, synthetic construct
  REGION 1..10: note = source = /note="Description of Artificial Sequence: Synthetic peptide"
GYTITNYGMN

SEQ ID NO: 1209 - protein, 10 aa, synthetic construct
  REGION 1..10: note = source = /note="Description of Artificial Sequence: Synthetic peptide"
WINTYTGEPT

SEQ ID NO: 1210 - protein, 10 aa, synthetic construct
  REGION 1..10: note = source = /note="Description of Artificial Sequence: Synthetic peptide"
GNGNPLGMDY

SEQ ID NO: 1211 - protein, 446 aa, synthetic construct; identical to SEQ ID NO: 1191
  REGION 1..446: note = source = /note="Description of Artificial Sequence: Synthetic polypeptide"

SEQ ID NO: 1212 - protein, 106 aa, synthetic construct
  REGION 1..106: note = source = /note="Description of Artificial Sequence: Synthetic polypeptide"
EIVLTQSPATLSLSPGERVTMSCGNGNPLGMDYWYQQKPGQAPRLWIYDTSKLASGVPARFSGSGSGTDYTLTISSMEPEDFAVYYCFQGSGYPLTFGQGTKLEIK

SEQ ID NO: 1213 - protein, 10 aa, synthetic construct
  REGION 1..10: note = source = /note="Description of Artificial Sequence: Synthetic peptide"
GNGNPLGMDY

SEQ ID NO: 1214 - protein, 7 aa, synthetic construct
  REGION 1..7: note = source = /note="Description of Artificial Sequence: Synthetic peptide"
DTSKLAS

SEQ ID NO: 1215 - protein, 9 aa, synthetic construct
  REGION 1..9: note = source = /note="Description of Artificial Sequence: Synthetic peptide"
FQGSGYPLT

SEQ ID NO: 1216 - protein, 213 aa, synthetic construct
  REGION 1..213: note = source = /note="Description of Artificial Sequence: Synthetic polypeptide"
EIVLTQSPATLSLSPGERVTMSCGNGNPLGMDYWYQQKPGQAPRLWIYDTSKLASGVPARFSGSGSGTDYTLTISSMEPEDFAVYYCFQGSGYPLTFGQGTKLEIKRTVAAPSVFIFPPSDEQLKSGTASVVCLLNNFYPREAKVQWKVDNALQSGNSQESVTEQDSKDSTYSLSSTLTLSKADYEKHKVYACEVTHQGLSSPVTKSFNRGEC

SEQ ID NO: 1217 - protein, 119 aa, synthetic construct
  REGION 1..119: note = source = /note="Description of Artificial Sequence: Synthetic polypeptide"
QVQLVQSGAEVKKPGASVKISCKASGYTITNYGMNWVRQAPGQGLEWMGWINTYTGEPTYAQKFQGRFTITLDTSTSTVYLEISSLRSEDTAVYYCARGNGNPLGMDYWGQGTLVTVSS

SEQ ID NO: 1218 - protein, 10 aa, synthetic construct
  REGION 1..10: note = source = /note="Description of Artificial Sequence: Synthetic peptide"
GYTITNYGMN

SEQ ID NO: 1219 - protein, 10 aa, synthetic construct
  REGION 1..10: note = source = /note="Description of Artificial Sequence: Synthetic peptide"
WINTYTGEPT

SEQ ID NO: 1220 - protein, 10 aa, synthetic construct
  REGION 1..10: note = source = /note="Description of Artificial Sequence: Synthetic peptide"
GNGNPLGMDY

SEQ ID NO: 1221 - protein, 446 aa, synthetic construct
  REGION 1..446: note = source = /note="Description of Artificial Sequence: Synthetic polypeptide"
QVQLVQSGAEVKKPGASVKISCKASGYTITNYGMNWVRQAPGQGLEWMGWINTYTGEPTYAQKFQGRFTITLDTSTSTVYLEISSLRSEDTAVYYCARGNGNPLGMDYWGQGTLVTVSSASTKGPSVFPLAPCSRSTSESTAALGCLVKDYFPEPVTVSWNSGALTSGVHTFPAVLQSSGLYSLSSVVTVPSSSLGTKTYTCNVDHKPSNTKVDKRVESKYGPPCPPCPAPEFLGGPSVFLFPPKPKDTLMISRTPEVTCVVVDVSQEDPEVQFNWYVDGVEVHNAKTKPREEQFNSTYRVVSVLTVLHQDWLNGKEYKCKVSNKGLPSSIEKTISKAKGQPREPQVYTLPPSQEEMTKNQVSLTCLVKGFYPSDIAVEWESNGQPENNYKTTPPVLDSDGSFFLYSRLTVDKSRWQEGNVFSCSVMHEALHNHYTQKSLSLSPGK

SEQ ID NO: 1222 - protein, 106 aa, synthetic construct; identical to SEQ ID NO: 1192
  REGION 1..106: note = source = /note="Description of Artificial Sequence: Synthetic polypeptide"

SEQ ID NO: 1223 - protein, 10 aa, synthetic construct
  REGION 1..10: note = source = /note="Description of Artificial Sequence: Synthetic peptide"
GNGNPLGMDY

SEQ ID NO: 1224 - protein, 7 aa, synthetic construct
  REGION 1..7: note = source = /note="Description of Artificial Sequence: Synthetic peptide"
DTSKLAS

SEQ ID NO: 1225 - protein, 9 aa, synthetic construct
  REGION 1..9: note = source = /note="Description of Artificial Sequence: Synthetic peptide"
FQGSGYPLT

SEQ ID NO: 1226 - protein, 213 aa, synthetic construct; identical to SEQ ID NO: 1196
  REGION 1..213: note = source = /note="Description of Artificial Sequence: Synthetic polypeptide"

SEQ ID NO: 1227 - protein, 119 aa, synthetic construct; identical to SEQ ID NO: 1217
  REGION 1..119: note = source = /note="Description of Artificial Sequence: Synthetic polypeptide"

SEQ ID NO: 1228 - protein, 10 aa, synthetic construct
  REGION 1..10: note = source = /note="Description of Artificial Sequence: Synthetic peptide"
GYTITNYGMN

SEQ ID NO: 1229 - protein, 10 aa, synthetic construct
  REGION 1..10: note = source = /note="Description of Artificial Sequence: Synthetic peptide"
WINTYTGEPT

SEQ ID NO: 1230 - protein, 10 aa, synthetic construct
  REGION 1..10: note = source = /note="Description of Artificial Sequence: Synthetic peptide"
GNGNPLGMDY

SEQ ID NO: 1231 - protein, 446 aa, synthetic construct; identical to SEQ ID NO: 1221
  REGION 1..446: note = source = /note="Description of Artificial Sequence: Synthetic polypeptide"

SEQ ID NO: 1232 - protein, 106 aa, synthetic construct; identical to SEQ ID NO: 1202
  REGION 1..106: note = source = /note="Description of Artificial Sequence: Synthetic polypeptide"

SEQ ID NO: 1233 - protein, 10 aa, synthetic construct
  REGION 1..10: note = source = /note="Description of Artificial Sequence: Synthetic peptide"
GNGNPLGMDY

SEQ ID NO: 1234 - protein, 7 aa, synthetic construct
  REGION 1..7: note = source = /note="Description of Artificial Sequence: Synthetic peptide"
DTSKLAS

SEQ ID NO: 1235 - protein, 9 aa, synthetic construct
  REGION 1..9: note = source = /note="Description of Artificial Sequence: Synthetic peptide"
FQGSGYPLT

SEQ ID NO: 1236 - protein, 213 aa, synthetic construct; identical to SEQ ID NO: 1206
  REGION 1..213: note = source = /note="Description of Artificial Sequence: Synthetic polypeptide"

SEQ ID NO: 1237 - protein, 119 aa, synthetic construct; identical to SEQ ID NO: 1217
  REGION 1..119: note = source = /note="Description of Artificial Sequence: Synthetic polypeptide"

SEQ ID NO: 1238 - protein, 10 aa, synthetic construct
  REGION 1..10: note = source = /note="Description of Artificial Sequence: Synthetic peptide"
GYTITNYGMN

SEQ ID NO: 1239 - protein, 10 aa, synthetic construct
  REGION 1..10: note = source = /note="Description of Artificial Sequence: Synthetic peptide"
WINTYTGEPT

SEQ ID NO: 1240 - protein, 10 aa, synthetic construct
  REGION 1..10: note = source = /note="Description of Artificial Sequence: Synthetic peptide"
GNGNPLGMDY

SEQ ID NO: 1241 - protein, 446 aa, synthetic construct; identical to SEQ ID NO: 1221
  REGION 1..446: note = source = /note="Description of Artificial Sequence: Synthetic polypeptide"

SEQ ID NO: 1242 - protein, 106 aa, synthetic construct; identical to SEQ ID NO: 1212
  REGION 1..106: note = source = /note="Description of Artificial Sequence: Synthetic polypeptide"

SEQ ID NO: 1243 - protein, 10 aa, synthetic construct
  REGION 1..10: note = source = /note="Description of Artificial Sequence: Synthetic peptide"
GNGNPLGMDY

SEQ ID NO: 1244 - protein, 7 aa, synthetic construct
  REGION 1..7: note = source = /note="Description of Artificial Sequence: Synthetic peptide"
DTSKLAS

SEQ ID NO: 1245 - protein, 9 aa, synthetic construct
  REGION 1..9: note = source = /note="Description of Artificial Sequence: Synthetic peptide"
FQGSGYPLT

SEQ ID NO: 1246 - protein, 213 aa, synthetic construct; identical to SEQ ID NO: 1216
  REGION 1..213: note = source = /note="Description of Artificial Sequence: Synthetic polypeptide"

SEQ ID NO: 1247 - protein, 119 aa, synthetic construct; identical to SEQ ID NO: 1097
  REGION 1..119: note = source = /note="Description of Artificial Sequence: Synthetic polypeptide"

SEQ ID NO: 1248 - protein, 10 aa, synthetic construct
  REGION 1..10: note = source = /note="Description of Artificial Sequence: Synthetic peptide"
GFTFSSYIMS

SEQ ID NO: 1249 - protein, 10 aa, synthetic construct
  REGION 1..10: note = source = /note="Description of Artificial Sequence: Synthetic peptide"
TISGGGTNTY

SEQ ID NO: 1250 - protein, 10 aa, synthetic construct
  REGION 1..10: note = source = /note="Description of Artificial Sequence: Synthetic peptide"
WLLSYYAMDY

SEQ ID NO: 1251 - protein, 446 aa, synthetic construct; identical to SEQ ID NO: 1101
  REGION 1..446: note = source = /note="Description of Artificial Sequence: Synthetic polypeptide"

SEQ ID NO: 1252 - protein, 107 aa, synthetic construct
  REGION 1..107: note = source = /note="Description of Artificial Sequence: Synthetic polypeptide"
DIQMTQSPSSLSASVGDRVTITCRASQNINVWLSWYQQKPGKAPKLLIYKASKSHTGVPSRFSGSGSGTDFTLTISSLQPEDFATYYCQQGQSYPYTFGQGTKLEIK

SEQ ID NO: 1253 - protein, 11 aa, synthetic construct
  REGION 1..11: note = source = /note="Description of Artificial Sequence: Synthetic peptide"
RASQNINVWLS

SEQ ID NO: 1254 - protein, 7 aa, synthetic construct
  REGION 1..7: note = source = /note="Description of Artificial Sequence: Synthetic peptide"
KASKSHT

SEQ ID NO: 1255 - protein, 9 aa, synthetic construct
  REGION 1..9: note = source = /note="Description of Artificial Sequence: Synthetic peptide"
QQGQSYPYT

SEQ ID NO: 1256 - protein, 214 aa, synthetic construct
  REGION 1..214: note = source = /note="Description of Artificial Sequence: Synthetic polypeptide"
DIQMTQSPSSLSASVGDRVTITCRASQNINVWLSWYQQKPGKAPKLLIYKASKSHTGVPSRFSGSGSGTDFTLTISSLQPEDFATYYCQQGQSYPYTFGQGTKLEIKRTVAAPSVFIFPPSDEQLKSGTASVVCLLNNFYPREAKVQWKVDNALQSGNSQESVTEQDSKDSTYSLSSTLTLSKADYEKHKVYACEVTHQGLSSPVTKSFNRGEC

SEQ ID NO: 1257 - protein, 119 aa, synthetic construct; identical to SEQ ID NO: 1097
  REGION 1..119: note = source = /note="Description of Artificial Sequence: Synthetic polypeptide"

SEQ ID NO: 1258 - protein, 10 aa, synthetic construct
  REGION 1..10: note = source = /note="Description of Artificial Sequence: Synthetic peptide"
GFTFSSYIMS

SEQ ID NO: 1259 - protein, 10 aa, synthetic construct
  REGION 1..10: note = source = /note="Description of Artificial Sequence: Synthetic peptide"
TISGGGTNTY

SEQ ID NO: 1260 - protein, 10 aa, synthetic construct
  REGION 1..10: note = source = /note="Description of Artificial Sequence: Synthetic peptide"
WLLSYYAMDY

SEQ ID NO: 1261 - protein, 446 aa, synthetic construct; identical to SEQ ID NO: 1101
  REGION 1..446: note = source = /note="Description of Artificial Sequence: Synthetic polypeptide"

SEQ ID NO: 1262 - protein, 107 aa, synthetic construct
  REGION 1..107: note = source = /note="Description of Artificial Sequence: Synthetic polypeptide"
DIQMTQSPSSLSASVGDRITITCRASQNINVWLSWYQQKPGKAPKLLIYKASKSHTGVPSRFSGSGSGTDFTLTISSLQPEDFATYYCQQGQSYPYTFGQGTKLEIK

SEQ ID NO: 1263 - protein, 11 aa, synthetic construct
  REGION 1..11: note = source = /note="Description of Artificial Sequence: Synthetic peptide"
RASQNINVWLS

SEQ ID NO: 1264 - protein, 7 aa, synthetic construct
  REGION 1..7: note = source = /note="Description of Artificial Sequence: Synthetic peptide"
KASKSHT

SEQ ID NO: 1265 - protein, 9 aa, synthetic construct
  REGION 1..9: note = source = /note="Description of Artificial Sequence: Synthetic peptide"
QQGQSYPYT

SEQ ID NO: 1266 - protein, 214 aa, synthetic construct
  REGION 1..214: note = source = /note="Description of Artificial Sequence: Synthetic polypeptide"
DIQMTQSPSSLSASVGDRITITCRASQNINVWLSWYQQKPGKAPKLLIYKASKSHTGVPSRFSGSGSGTDFTLTISSLQPEDFATYYCQQGQSYPYTFGQGTKLEIKRTVAAPSVFIFPPSDEQLKSGTASVVCLLNNFYPREAKVQWKVDNALQSGNSQESVTEQDSKDSTYSLSSTLTLSKADYEKHKVYACEVTHQGLSSPVTKSFNRGEC

SEQ ID NO: 1267 - protein, 119 aa, synthetic construct; identical to SEQ ID NO: 1107
  REGION 1..119: note = source = /note="Description of Artificial Sequence: Synthetic polypeptide"

SEQ ID NO: 1268 - protein, 10 aa, synthetic construct
  REGION 1..10: note = source = /note="Description of Artificial Sequence: Synthetic peptide"
GFTFSSYIMS

SEQ ID NO: 1269 - protein, 10 aa, synthetic construct
  REGION 1..10: note = source = /note="Description of Artificial Sequence: Synthetic peptide"
TISGGGTNTY

SEQ ID NO: 1270 - protein, 10 aa, synthetic construct
  REGION 1..10: note = source = /note="Description of Artificial Sequence: Synthetic peptide"
WLLSYYAMDY

SEQ ID NO: 1271 - protein, 446 aa, synthetic construct; identical to SEQ ID NO: 1111
  REGION 1..446: note = source = /note="Description of Artificial Sequence: Synthetic polypeptide"

SEQ ID NO: 1272 - protein, 107 aa, synthetic construct; identical to SEQ ID NO: 1252
  REGION 1..107: note = source = /note="Description of Artificial Sequence: Synthetic polypeptide"

SEQ ID NO: 1273 - protein, 11 aa, synthetic construct
  REGION 1..11: note = source = /note="Description of Artificial Sequence: Synthetic peptide"
RASQNINVWLS

SEQ ID NO: 1274 - protein, 7 aa, synthetic construct
  REGION 1..7: note = source = /note="Description of Artificial Sequence: Synthetic peptide"
KASKSHT

SEQ ID NO: 1275 - protein, 9 aa, synthetic construct
  REGION 1..9: note = source = /note="Description of Artificial Sequence: Synthetic peptide"
QQGQSYPYT

SEQ ID NO: 1276 - protein, 214 aa, synthetic construct; identical to SEQ ID NO: 1256
  REGION 1..214: note = source = /note="Description of Artificial Sequence: Synthetic polypeptide"

SEQ ID NO: 1277 - protein, 119 aa, synthetic construct; identical to SEQ ID NO: 1107
  REGION 1..119: note = source = /note="Description of Artificial Sequence: Synthetic polypeptide"

SEQ ID NO: 1278 - protein, 10 aa, synthetic construct
  REGION 1..10: note = source = /note="Description of Artificial Sequence: Synthetic peptide"
GFTFSSYIMS

SEQ ID NO: 1279 - protein, 10 aa, synthetic construct
  REGION 1..10: note = source = /note="Description of Artificial Sequence: Synthetic peptide"
TISGGGTNTY

SEQ ID NO: 1280 - protein, 10 aa, synthetic construct
  REGION 1..10: note = source = /note="Description of Artificial Sequence: Synthetic peptide"
WLLSYYAMDY

SEQ ID NO: 1281 - protein, 446 aa, synthetic construct; identical to SEQ ID NO: 1111
  REGION 1..446: note = source = /note="Description of Artificial Sequence: Synthetic polypeptide"

SEQ ID NO: 1282 - protein, 107 aa, synthetic construct; identical to SEQ ID NO: 1262
  REGION 1..107: note = source = /note="Description of Artificial Sequence: Synthetic polypeptide"

SEQ ID NO: 1283 - protein, 11 aa, synthetic construct
  REGION 1..11: note = source = /note="Description of Artificial Sequence: Synthetic peptide"
RASQNINVWLS

SEQ ID NO: 1284 - protein, 7 aa, synthetic construct
  REGION 1..7: note = source = /note="Description of Artificial Sequence: Synthetic peptide"
KASKSHT

SEQ ID NO: 1285 - protein, 9 aa, synthetic construct
  REGION 1..9: note = source = /note="Description of Artificial Sequence: Synthetic peptide"
QQGQSYPYT

SEQ ID NO: 1286 - protein, 214 aa, synthetic construct; identical to SEQ ID NO: 1266
  REGION 1..214: note = source = /note="Description of Artificial Sequence: Synthetic polypeptide"

SEQ ID NO: 1287 - protein, 117 aa, synthetic construct
  REGION 1..117: note = source = /note="Description of Artificial Sequence: Synthetic polypeptide"
EVQLQQSGPELVKPGASMKISCKASGYSFTGYTMNWVRQSHGKNLEWLGLIFPYNGGTSYNQNFKGKATLTVDTSSSTAYMELLSLTSVDSAVYYCARGVRFALDYWGQGTSVSVSS

SEQ ID NO: 1288 - protein, 10 aa, synthetic construct
  REGION 1..10: note = source = /note="Description of Artificial Sequence: Synthetic peptide"
GYSFTGYTMN

SEQ ID NO: 1289 - protein, 10 aa, synthetic construct
  REGION 1..10: note = source = /note="Description of Artificial Sequence: Synthetic peptide"
LIFPYNGGTS

SEQ ID NO: 1290 - protein, 8 aa, synthetic construct
  REGION 1..8: note = source = /note="Description of Artificial Sequence: Synthetic peptide"
GVRFALDY

SEQ ID NO: 1291 - skipped

SEQ ID NO: 1292 - protein, 112 aa, synthetic construct
  REGION 1..112: note = source = /note="Description of Artificial Sequence: Synthetic polypeptide"
DVVMTQTPLSLPVSFGDQVSISCRSSQSLANSYGNTYLSWYLHKPGQSPQLLIYEISNRFSGVPDRFSGSGSGTDFTLNISTIKPEDLGMYYCLQGTHQPWTFGGGTKLEIK

SEQ ID NO: 1293 - protein, 16 aa, synthetic construct
  REGION 1..16: note = source = /note="Description of Artificial Sequence: Synthetic peptide"
RSSQSLANSYGNTYLS

SEQ ID NO: 1294 - protein, 7 aa, synthetic construct
  REGION 1..7: note = source = /note="Description of Artificial Sequence: Synthetic peptide"
EISNRFS

SEQ ID NO: 1295 - protein, 9 aa, synthetic construct
  REGION 1..9: note = source = /note="Description of Artificial Sequence: Synthetic peptide"
LQGTHQPWT

SEQ ID NO: 1296 - skipped

SEQ ID NO: 1297 - protein, 119 aa, synthetic construct; identical to SEQ ID NO: 927
  REGION 1..119: note = source = /note="Description of Artificial Sequence: Synthetic polypeptide"

SEQ ID NO: 1298 - protein, 8 aa, synthetic construct
  REGION 1..8: note = source = /note="Description of Artificial Sequence: Synthetic peptide"
GYTFSSYV

SEQ ID NO: 1299 - protein, 8 aa, synthetic construct
  REGION 1..8: note = source = /note="Description of Artificial Sequence: Synthetic peptide"
IDPYNDGA

SEQ ID NO: 1300 - protein, 12 aa, synthetic construct
  REGION 1..12: note = source = /note="Description of Artificial Sequence: Synthetic peptide"
ARGGPYGWYFDV

SEQ ID NO: 1301 - protein, 443 aa, synthetic construct
  REGION 1..443: note = source = /note="Description of Artificial Sequence: Synthetic polypeptide"
EVQLQQSGPELVKPGSSVKMSCKASGYTFSSYVMHWVKQKPGQGLEWIGYIDPYNDGAKYNEKFKGKATLTSDKSSSTAYMELSSLTSEDSAVYYCARGGPYGWYFDVWGAGTTVTVSSAKTTPPSVYPLAPGSAAQTNSMVTLGCLVKGYFPEPVTVTWNSGSLSSGVHTFPAVLQSDLYTLSSSVTVPSSTWPSETVTCNVAHPASSTKVDKKIVPRDCGCKPCICTVPEVSSVFIFPPKPKDVLTITLTPKVTCVVVDISKDDPEVQFSWFVDDVEVHTAQTQPREEQFNSTFRSVSELPIMHQDWLNGKEFKCRVNSAAFPAPIEKTISKTKGRPKAPQVYTIPPPKEQMAKDKVSLTCMITDFFPEDITVEWQWNGQPAENYKNTQPIMDTDGSYFVYSKLNVQKSNWEAGNTFTCSVLHEGLHNHHTEKSLSHSPGK

SEQ ID NO: 1302 - protein, 107 aa, synthetic construct; identical to SEQ ID NO: 932
  REGION 1..107: note = source = /note="Description of Artificial Sequence: Synthetic polypeptide"

SEQ ID NO: 1303 - protein, 6 aa, synthetic construct
  REGION 1..6: note = source = /note="Description of Artificial Sequence: Synthetic peptide"
EHIYSY

SEQ ID NO: 1304 - skipped

SEQ ID NO: 1305 - protein, 9 aa, synthetic construct
  REGION 1..9: note = source = /note="Description of Artificial Sequence: Synthetic peptide"
QHHFGSPLT

SEQ ID NO: 1306 - protein, 214 aa, synthetic construct
  REGION 1..214: note = source = /note="Description of Artificial Sequence: Synthetic polypeptide"
DIQMTQSPASLSASVGETVTITCRASEHIYSYLSWYQQKQGKSPQLLVYNAKTLAEGVPSRFSGSGSGTQFSLKINSLQPEDFGTYYCQHHFGSPLTFGAGTTLELKRADAAPTVSIFPPSSEQLTSGGASVVCFLNNFYPKDINVKWKIDGSERQNGVLNSWTDQDSKDSTYSMSSTLTLTKDEYERHNSYTCEATHKTSTSPIVKSFNRNEC

SEQ ID NO: 1307 - protein, 130 aa, synthetic construct; identical to SEQ ID NO: 937
  REGION 1..130: note = source = /note="Description of Artificial Sequence: Synthetic polypeptide"

SEQ ID NO: 1308 - protein, 10 aa, synthetic construct
  REGION 1..10: note = source = /note="Description of Artificial Sequence: Synthetic peptide"
GGSVSSGIYY

SEQ ID NO: 1309 - protein, 7 aa, synthetic construct
  REGION 1..7: note = source = /note="Description of Artificial Sequence: Synthetic peptide"
IYYSGST

SEQ ID NO: 1310 - protein, 22 aa, synthetic construct
  REGION 1..22: note = source = /note="Description of Artificial Sequence: Synthetic peptide"
ARDYYVSGNYYNVDYYFFGVDV

SEQ ID NO: 1311 - protein, 454 aa, synthetic construct
  REGION 1..454: note = source = /note="Description of Artificial Sequence: Synthetic polypeptide"
QVHLQESGPGLVKPSETLSLTCTVSGGSVSSGIYYWSWIRQPPGKGLEWIGYIYYSGSTNYNPSLKSRVTISVDTSKNQFSLKLSSVTAADTAVYYCARDYYVSGNYYNVDYYFFGVDVWGQGTTVTVSSAKTTPPSVYPLAPGSAAQTNSMVTLGCLVKGYFPEPVTVTWNSGSLSSGVHTFPAVLQSDLYTLSSSVTVPSSTWPSETVTCNVAHPASSTKVDKKIVPRDCGCKPCICTVPEVSSVFIFPPKPKDVLTITLTPKVTCVVVDISKDDPEVQFSWFVDDVEVHTAQTQPREEQFNSTFRSVSELPIMHQDWLNGKEFKCRVNSAAFPAPIEKTISKTKGRPKAPQVYTIPPPKEQMAKDKVSLTCMITDFFPEDITVEWQWNGQPAENYKNTQPIMDTDGSYFVYSKLNVQKSNWEAGNTFTCSVLHEGLHNHHTEKSLSHSPGK

SEQ ID NO: 1312 - protein, 109 aa, synthetic construct; identical to SEQ ID NO: 942
  REGION 1..109: note = source = /note="Description of Artificial Sequence: Synthetic polypeptide"

SEQ ID NO: 1313 - protein, 6 aa, synthetic construct
  REGION 1..6: note = source = /note="Description of Artificial Sequence: Synthetic peptide"
QSVSSY

SEQ ID NO: 1314 - skipped

SEQ ID NO: 1315 - protein, 11 aa, synthetic construct
  REGION 1..11: note = source = /note="Description of Artificial Sequence: Synthetic peptide"
QQRSNWPPLFT

SEQ ID NO: 1316 - protein, 216 aa, synthetic construct
  REGION 1..216: note = source = /note="Description of Artificial Sequence: Synthetic polypeptide"
EIVLTQSPATLSLSPGERATLSCRASQSVSSYLAWYQQKPGQAPRLLIYDASNRATGIPARFSGSGSGTDFTLTISSLEPEDFAVYYCQQRSNWPPLFTFGPGTKVDIKRADAAPTVSIFPPSSEQLTSGGASVVCFLNNFYPKDINVKWKIDGSERQNGVLNSWTDQDSKDSTYSMSSTLTLTKDEYERHNSYTCEATHKTSTSPIVKSFNRNEC

1. A method for determining a cancer patient population for treatment with an anti-PVRIG antibody, the method comprising:
(a) detecting the presence in a biological sample from the cancer patient one or more cellular components selected from the group consisting of:
(i) TSCM, TRM, naïve, exhausted, cycling, and effector CD8 positive T cells, that express PVRIG; and/or
(ii) activated DC cells, DC1, and/or DC2 that express PVRL2,
(b) quantitating the measurement of the level of components selected from the group consisting of:
(i) TSCM, TRM, naïve, exhausted, cycling, and effector CD8 positive T cells, that express PVRIG; and/or
(ii) activated DC cells, DC1, and/or DC2 that express PVRL2; and
(c) treating the cancer patient with the anti-PVRIG antibody when one or more cellular components in (a) as quantitated in step (b) are present at an increased level as compared to a control or a patient that does not have detectable levels of the cells.

2.-6. (canceled)

7. The method according to claim 1, wherein the biological sample is obtained from a tumor, tumor microenvironment, and/or peripheral blood from the cancer patient.

8.-11. (canceled)

12. A method for determining a cancer patient population for treatment with an anti-PVRIG antibody, the method comprising:
(a) detecting the presence in a biological sample from the cancer patient early memory CD8 T cells;
(b) quantitating the measurement of the level of early memory CD8 T cells;
(c) treating the cancer patient with the anti-PVRIG antibody when the level of early memory CD8 T cells are present at an increased level as compared to a control or a patient that does not have detectable levels of the cells.

13-15. (canceled)

16. The method according to claim 1, wherein the anti-PVRIG treatment antibody comprises a heavy chain variable domain from the heavy chain of CHA.7.518.1.H4(S241P) (SEQ ID NO:8) and a light chain variable domain from the light chain of CHA.7.518.1.H4(S241P) (SEQ ID NO:13).

17. (canceled)

18. The method according to claim 1, wherein the PVRIG and/or PVRL2 expression is determined using single-cell resolution analysis.

19. The method according to 18, wherein the single-cell resolution analysis includes RNAseq, immunohistochemistry (IHC), multiplex immunohistochemistry (mIHC) and/or immunofluorescence (IF), flow cytometry (e.g., FACS) and mass cytometry (e.g., CyTOF), as well as combinations thereof.

20.-22. (canceled)

23. The method according to claim 18, wherein the PVRIG antibody used for the single-cell resolution analysis and/or immunohistochemistry comprises:
i) a heavy chain variable domain comprising the vhCDR1, vhCDR2, and vhCDR3 from the heavy chain of 6D8-1 (SEQ ID NO:659), and
ii) a light chain variable domain comprising the vlCDR1, vlCDR2, and vlCDR3 from the light chain of 6D8-1 (SEQ ID NO:663).

24.-46. (canceled)

47. The method according to claim 1, wherein the anti-PVRIG treatment antibody is administered as a stable liquid pharmaceutical formulation of the anti-PVRIG antibody comprising:
(a) an anti-PVRIG antibody, wherein the anti-PVRIG antibody comprises:
i) a heavy chain variable domain comprising the vhCDR1, vhCDR2, and vhCDR3 from the heavy chain of CHA.7.518.1.H4(S241P) (SEQ ID NO:8), and
ii) a light chain variable domain comprising the vlCDR1, vlCDR2, and vlCDR3 from the light chain of CHA.7.518.1.H4(S241P) (SEQ ID NO:13);
(b) from 10 mM to 100 mM histidine;
(c) from 30 mM to 100 mM NaCl;
(d) from 20 mM to 150 mM L-Arginine; and
(e) from 0.005% to 0.1% w/v polysorbate 80,
wherein the formulation has a pH from 5.5 to 7.0.

48. The method according to claim 1, wherein the anti-PVRIG treatment antibody comprises a CH1-hinge-CH2-CH3 sequence of IgG4 (SEQ ID NO:657 or SEQ ID NO:658), wherein the hinge region optionally comprises mutations.

49.-62. (canceled)

63. The method according to claim 47, wherein the anti-PVRIG antibody is at a concentration of from 10 mg/mL to 40 mg/mL, 15 mg/mL to 40 mg/mL, 15 mg/mL to 30 mg/mL, 10 mg/mL to 25 mg/mL, or 15 mg/mL to 25 mg/mL.

64. (canceled)

65. The method according to claim 47, wherein the anti-PVRIG antibody formulation comprises:
a) a heavy chain comprising:
i) a VH-CH1-hinge-CH2-CH3, wherein the VH is from CHA.7.518.1.H4(S241P) (SEQ ID NO:4) and wherein the CH1-hinge-CH2-CH3 region is from IgG4; and
b) a light chain comprising:
i) a VL-CL, wherein the VL is from CHA.7.518.1.H4(S241P) (SEQ ID NO:9) and wherein the CL region is from human kappa 2 light chain.

66.-70. (canceled)

71. The method according to claim 1, wherein the anti-PVRIG treatment antibody is administered at a dosage of about 0.01 mg/kg to about 20 mg/kg of the anti-PVRIG antibody or about 0.01 mg/kg to about 10 mg/kg of the anti-PVRIG antibody.

72. (canceled)

73. The method according to claim 1, wherein the anti-PVRIG treatment antibody is administered 20 mg/kg every 4 weeks.

74. (canceled)

75. The method according to claim 1, wherein the anti-PVRIG antibody is administered in combination with an anti-PD-1 antibody.

76. The method according to claim 1, wherein the anti-PVRIG antibody is administered in combination with an anti-PD-L1 antibody.

77. The method according to claim 1, wherein the anti-PVRIG antibody is administered in combination with an anti-TIGIT antibody.

78. The method according to claim 1, wherein the anti-PVRIG antibody is administered in combination with an anti-PD-1 antibody and an anti-TIGIT antibody.

79. The method according to claim 1, wherein the anti-PVRIG antibody is administered in combination with an anti-PD-L1 antibody and an anti-TIGIT antibody.

80.-193. (canceled)

194. The method according to claim 1, wherein the activated DC cells, DC1, and/or DC2 express CXCL10.

195. The method according to claim 12, wherein the early memory CD8 T cells include CD8 T cells expressing CXCR3.

196. The method according to claim 1, wherein the cancer selected from the group consisting of prostate cancer, liver cancer (HCC), colorectal cancer (CRC), colorectal cancer MSS (MSS-CRC; including refractory MSS colorectal), CRC (MSS unknown), ovarian cancer (including ovarian carcinoma), endometrial cancer (including endometrial carcinoma), breast cancer, pancreatic cancer, stomach cancer, cervical cancer, head and neck cancer, thyroid cancer, testis cancer, urothelial cancer, lung cancer, melanoma, non-melanoma skin cancer (squamous and basal cell carcinoma), glioma, renal cell cancer (RCC), renal cell carcinoma (RCC), lymphoma (non-Hodgkins' lymphoma (NHL) and Hodgkin's lymphoma (HD)), Acute myeloid leukemia (AML), T cell Acute Lymphoblastic Leukemia (T-ALL), Diffuse Large B cell lymphoma, testicular germ cell tumors, mesothelioma, esophageal cancer, triple negative breast cancer, Merkel Cells cancer, MSI-high cancer, KRAS mutant tumors, adult T-cell leukemia/lymphoma, pleural mesothelioma, anal SCC, neuroendocrine lung cancer (including neuroendocrine lung carcinoma), NSCLC, NSCL (large cell), NSCLC large cell, NSCLC squamous cell, cervical SCC, malignant melanoma, pancreatic cancer, pancreatic adenocarcinoma, adenoid cystic cancer (including adenoid cystic carcinoma), primary peritoneal cancer, microsatellite stable primary peritoneal cancer, platinum resistant microsatellite stable primary peritoneal cancer, Myelodysplastic syndromes (MDS), HNSCC, PD1 refractory or relapsing cancer, gastroesophageal junction cancer, gastric cancer, and/or fallopian tube cancer.
